United States Patent Application Publication US 2025/0205292 A1 - sequence listing, part 6

SEQ ID NO: 9 - DNA, 2249239 bp, Bifidobacterium bifidum
  source 1..2249239: mol_type = genomic DNA
atgtcggatgaccttctcggtccagccgggcaagccacgcggatatggtcggacacgctgcgtctgctcaagcagaatcccacgctgtcgccgcgcgacaagagctggcttgaaggagtcgtaccggaagcggtatatggcacgaccatcgtattgtgcgtaagcaacatggccacgcagcaagcgttgcagaatgaactcaatgcgccgctgctcaacgctttgaaaatcatatccggaaacgacatgttcccggcgttcaaaatcgtggctcctcaggtgtcccaaccggaaccgcagccgccggcatcccggcatcccgatactgcggcgaaaccgagcgaaccgttccctgcgaatctgtcgccgaccgtcgccgatctggctcaggaatcctacatgcccaacagcatgcagtcaatctcctccatcgattcgatttccgcggaaatgacggaggcgaatcagcaaccaggcgccacggctcctcgaatacccggcgagccgagttttccggtccggcagcagaaggtgatgcgcgatccggaaacccatctgaacaagaactcgacgttcgacacgttcgttcccggtgattccaaccgtttcgcacgcactgtcgcgcttgcggtcgccgagggaaccgggcaggaattcaacccgttgtgtatctacggcggatcgggactgggcaagacccacctgctcaacgccatcggcaactatgcattggtcaaggatcccacgctcaaggttcgatacgtcaacagcgaggaattcaccaacgaattcatcgaggcactgcagaccccggcccagagccagaaccgcatcgcagaattcaaccgccgataccgcgaggtcgacgtgttgctcatcgacgacatccagttcctcggcggcaaggaagcgaccctcgaacagttcttccacacgttcaacgcgctgcatcaggccaacaagcgtatcgtcatcgcgtccgatgtcgcgcccaagaacctcaagggcttcgaggcacgactcatctcgcgtttcgactccggactcaccgtcgatgtcaagccgcctgatcttgagacccgcatcgctattttgcgcatgatggcttcgatgaacggcacttcgacaccgaatgacgtgctgaatctgatcgcggagcgcttcaccgagaacatccgcgagctggaaggcgccctgattcgcgtgagcgcggtggcatcgctgagcagtcagccggtgacccgcgcgcttgccgagcagacgctgcaggacttcttcaccaccgacgtggaaatcaagccgaccgacatcatcgggcagacggcgaaatacttccatctgacattcgacgacatcgtcgggcgcgcgcgaacgaaaaacatcgcgctggcccgtcaggtcgccatgtatcttgcccgcgagatgaccagcatgagcctggtcgatatcggcgaagtgttcggcggccgcgatcacaccacggtcatgcacgcgtatacccgcgtcagcgatgatatgcaggaaaagcctgaaatttacaactacgtgaccgagctgaccgcgcgcctcaagcagcgcggcaatgagtgacgacagtcgttttctctcggctgtgcaatggtcccgtctggcacgatcgcgctgagacaccaaaaaacgcctttttttcgtcgctgtgcgtgattctgctggatgaaggcctgattcgtcaccgtcgacaggacctatcagactcaaataatatagacatacatatttaatctgtacaataaaacaggcgcaacacgccgaacgatctgctgattgaaggaaaagttatccacatgcttattcacaaatgtgggtagagcctgcggataacttgtggactactgcacattttttgtggatgaacagtggattaatccacaggaaatgtggacaatcaaaacagttcgccgaaaatgtggataactcggtacttatgcacattttgtccggaaagttatccacataatctgtgggttactcagcccatataaacacaaggattcgcgcagttatccacactatccacagggcttattactacgactatcttatttctctttcgataaccgtcgtgatgataactcacttcgcgcatgagaaaaacaatccgaacatgacccgctagaatgttgccaagcacatcgtgaaatgagggaacccatgaaagtagaaatcgattccgcggctctcgccgacgccgtagcctggacgacccgcgtcatcgacgcccgaccggcaagccccatccttgcaggtatccagctcgaagccatcgacggcacccttcaactgtccgcgttcaattacgagatttccgcacgtcaccacatcgaagccggtatcgacgaacccggaaccgcactggtactcggcaaactcctcgccgacatcaccaagtcactgcctgccgaaaagacctacctgtcgaccgacggctccaccatgaccatcaactcgggcaagtccacgttcaccatgcagctcatgcccgatgccgaatacccggatctgccggtcgtgccggcaaagctcggccaggtcgacgcacccacgttcatccaggccgtaacccaggccagcgtcgcggtctcccgcgaggagaaccgcccggtgctgaccggcgtgcgcatgcagttcgacggcgacaaagtcaccatgacctcgaccgaccgtttccgcctgtcccgcgccacgttcacctggacgccgcagaacatcgacacctctacgaccacactggtgcgcggatccctgctgcgcgacgtcgcccgcgcgcttgacgatcaccagaacgtcgtcatcgatttcgacgccgacaaccccacgctgctcggtttcgagaacgccggacgcgtctcgacatcccagctgatcgacggcgaattccctgcggtcgaccgtctgttcgccgacgaatacccgattcaggccgtcatcgacaagcagctgctgatcgccgccatcaagcgcgtcgcgctggtcgccgaacgcaacgccccgatccgcatggtgttctccggccaggaagtcaccctgtccgccggcgccgtggacgaagcccaggcgcaggaaatgctggacatcgacatggacggcgaagacatcaccgtcgcgttcaacccgtcctacctgatcgaaggcctgagcgccatcactgagccgttcgtgcgcatgaagatgaccacggccgtcaagcccgtcgaattcaacggccagcaggaggcggacagcgacgaatcgatggattaccgctatctgctcgtcccgatgcgtttcaacagctgagcccgacggctgaacactggaatccgaatcgaatcgccggcaccgccgaaacacacggtgccggcgatgacatgacaggagcccatcttgtacatttcgcgtcttgcgcttgaccattaccggtcatggaaccattgcgtgctcgacctcacgccgggcatcaacatcctgcagggggcgaacgggcttgggaaaaccaacatcgtcgaatcgatagaagtgctgtccacgggcctgagccatcgcacatccagctcggttccgctggtgcagcgcggcgaacatgcagcgacgatccgggccaatatcgaatccgtgacggatccggagcccgctgatgatggcgtcaataccagcgctgatgccgtggatatctcggacatgaaaccggtccggcagacacagaccaccacccttgaggccacgattgcggcacgaggcgccaaccgcgcccgcatcaacggcgggcagtcgcggtatctgcgggagattctcggcacgctgccgaccgtgagcttcaccccggaggatcagcagcttgtggcgggcgaccccgccgtgcgccgctcgttcatcaaccaggtcgcctcgctgctgattcccggatatgcgaaccggttgcaatcattcacgcacgtcgccaagcaacgggcggcactgctcaaacagctcggtcaatggcagcgtgcaggatccccgattgacgccgcgctcagcgggctggagatctggaccggacagttcatcgaggcgggagtcgcgctcagccgcgacaggcagcgcatcatcgcggaactgaacaagtcgttcggcccgctgtatgccagattggccggtgtggcgggcgacttgccgtccaatgcggaaattcaggatgccgcgcaggatggtggtgagcaggcagcggtcgaatacgtgccgtcattcgacgagatccttggaacacaggcgcccgaaccgttgataagccagcatttccagcgcatctatcccggcgaggtgtctcgcggcgtcaatctgatcggcccgcaacgagatgacctgttggtgacgctcaatggcatgccggccagggaattcgcctccaacggcgagatgtggacgttggccctggcattgaagatggcacaataccgggccctttgcgagtatttcgacaccaggccggtggtgattctcgacgatgtgttcgctcagctcgacgaatcgcgccgcaccgagatcctgcgttttgccgcggctcaggatcaggtactgatcaccgcggccgcggaaagcgatattccgatactgccggcgaatgagtcgacagaatccggcgagataccggtgaaccgcatcgcagtggccgatctcaaacggcgcgacgaagcggatgccgagagggccggcgaacaatgaccgaaccccgcaagccgaatacgccgggcgggccgggggcaccgagcaggcccgacaagccgggcagcgcggtcaagccgggcaatgtacacgattcgcacgagccgatttgcgcgaccctgcatctcgaccagcgcaaactgcccgccacggtgttcgagcacatcgccaagatggcgggaggaaggcgtcagcggatgattgacgccgaggccgcatgggagaacttcggcaagccgggccgtgacccgagcaccttgggcagcgtaacggcgctgattgcgaataacggtcattggataccgtatctgaaaatcgcgcagctgcgcaatcactgggatcaggtggtcggaccggtcatcgcccagcattcgcaggtcatcgggctgcgcgacggagtcatgaccatccgtgccgattccgcggcttgggccacccagctcacctacctgattccgcagctggaacgtaccatcaaggagcgcctgcagggattggacgtccacaagatccaggtaacaggcccccgtgccgcgacatttcgcggctcaaggatgaagaggcgctaaattcgctcagagagccaaagtccccgtagacgggtaggattggcggataataggttcagcgcttagaaacccccgttattcgcgttctagagcgtatcgcccgcagaacaacctttcatgacgaaagaatatgcaggaaggaaaccgttagtggcagttcttgaatcggattccgaacatgaatcccgtgacgagtccggcatgcctgagcaggctccgggcagcggtctgacggcgagcagcgccgagcagcatgaccgcgaggtcgatgaagccatcgcccaggacgagctcgatgacgcccagcttgacgacaccttatcgcccgaccattatgacgccagcgacctgaaggtgctggaaggccttgaggcggtacgcatccgcccgggcatgtacatcggctccaccggcccgcgcggtctgcaccacctggtctacgagatcgtcgacaactccgtcgacgaggcactggccggctacgccacgcatatcgaagtgacgatcctgccggacaacggcatccgcgtcgttgacgatggtcgaggcatcccggtcgacgaagttcccggcgaaggcgtctccggcgtcgagaccgtgatgaccaagctgcacgccggcggtaaattcggcggcggcggatacgcggtgtccggcggccttcacggtgtcggcatctccgtggtcaacgcgctgtcgacgcgagtcgatatcgaagtgcggcgccagggattccactggacccagacatacgtcaaccagcatccgacggcccgcctcgccaagggcgccccgatggccgaggatgagtcgaccggcacttccgtgacgttctggcccgatgcggcgatcttcgaaagcacggtatacgacttcgagacgctgcgctcccgcttccagcagatggcgttcctgaacaagggactgaagatttcactcaccgacctgcgcgagccggatctggccggcgacgaagtggccggcgatgacgattccaccgagccgaagcaccagagcgtgacttaccagtacatgaacggcatcaaggattatgtctcgtacctggtcaagtcccgcaaggccactcccgtcgaggaggatgtcatcgatttcgaggccgaagacctcaagatcggcatctcggccgaggtcgcgatgcagtggaccaccgcgtattccgaggctgtgcacacgttcgcgaacacgatctccaccacagagggcggcacgcacgaagaaggcttccgtgcagcgctgacctcgctggtgaaccggtatgcgcgagacaagaacatcctcaaggagaaggacgacaacctctccggcgacgatgtgcgcgaaggcctgaccgccgtcgtgtccgtcaagctgaccactcctcagttcgaagggcagacgaagaccaagctcggcaactccgaggcgaagaccttcgtgcagcgcgtgatgaccgacaagctcggcgactggttcgacgcgcaccccgcagaggccaagaacatcatccagaaggccatcgaagcctcccgcgcccgcatcgcggcgaagaaagcccgcgagaacacccggcgcaagtcgattttcgagtcggccggcatgcccgacaagctcaaggactgccagtccagcaaccccgaagagtgcgagctgttcatcgtcgagggtgattctgcaggcggctcagccattcaagggcgaaacccggagacgcaggccatcctgccgcttcgaggcaagattctcaacaccgaacgcgcctccatcgaccgcatgatgaagtccgacaccatcgagtcgctgatcaccgcggtcggcggcggctatggcgaggaattcgacgtgagcaaggtgcgctaccacaaggtcatcatcatggccgatgcagatgtggacggtgcccatatcgccacgctgaacctgacgctgttcttccgttacatgcgaccgatgatcaccgcaggatacgtgtatgtggccatgcctccgctgtaccgtctcaagtggacgcgcggcgatcatgattacgtgtacaccgaccgcgaacgcgacgagaaactcgcccagggcaaggccgcaggccggcagctgcccaagggcgaaggcatccagcgctacaagggtctgggtgagatgacctaccaggagctgtgggagaccaccatggatcctgagcaccgcatcctgaagcagattcacatcgaggatgccgcggcagcggacgagaccttctcgatgctgatgggcgacgacgtggaaccgcgccgtcttttcatccaacgcaatgccaaggatgtgcgtttcatcgacgcttaaggttctaatccaagccccgccggcgggggggggctgtcagcgtagctgactgggggtggtcccgatccacccgatgacagcgacagaaacgacgtccaacatacggtcgaacagaatttaaccaaaggacaaccaagtggcagacgaaaacagcaacggcaccgacctgccggagcagaatgacgagcgtgccgaacactcgatggagcccatcagccctcaggccaacgaacagttggtcctcgacgacaatcgcgtggcccacaccgacatccagaaggagatgcgtcagtcgtacctcgactatgccatctccgtcatcgtcgaacgagcccttccggatgtgcgcgacggcatgaagccggtgcaccgccgcatcgtgtacgcgatgtatgacggcggctaccgtcctgatcgcggctattccaagtgcgcccgacccgtcgccgacgtgatgggcaactaccacccacacggcgacgccgcgatctacgattcgctggtgcgcatggcccagccgtggtcgatgcgatacacgctggtcgacgggcagggcaacttcggctcggccggtgacgacccgcccgcagccatgcgttacaccgagtgccgcatgatgccgcttgcgatggaaatggtgcgagacatcgacaaggacaccgtcgacttcgtgcccaactacgatggccgtacgcaggaacccaccgtgttgcccgcgcgcttcccgaacctgctggccaacggctcgtccggtatcgccgtcggcatggcgaccaacattccgccgcacaacatgcgcgagctggcggaaggcgtgcattggacgctcgatcatcccgaagcgagccgtgaagagctgctgaacgcactcatcggcatcatcaagggaccggacttcccgaccggcgctacgatcctcggccacaagggcatcgagcaggcgtaccgcaccggccgcggcctgattacgatgcgcgcggtggtcaacaccgaggagatcaagggccgtatgtgcctggtggtcaccgagctgccgtatcaggtgaatcccgaccgtctggccgcttccatccgagaaggcgtgcgcgacggcaagatccagggcatcgccgacatgcgcgacgagacctcgggccgtaccggccagcgactcgtgctcgtgctcaagcgcgacgccgtgccgaaggtcgtgctcaacaacctgtacaagcactcccagctgcagcagacgttcggcgcgaacatgctcgcgctggtcgacggcgtgccgcgcacgctgagcctcgacgccttcatccgccattgggtgaaccaccagctcgaagtcatcgaacgccgtacccgttacctcaagcgcgaggccgaggaacgcgaccacatcctgcagggcctgctcaaggccatggacgccatcgacgaggtcatccgcctcatccgctccagccagggccgcgaggacgcccggccgaagctgatggagttccttgacatcgatcaggtgcaggccgacgccatcctttccatgcagctggttcgactggccaacatggaacgccagaagatcatcgacgagcatgaggaactcatgcgcaagattgccgactacaacgacatcctcgccaagccggaacgccagcgtacgatcgtcggcgacgagctcgacgagatcgtcgcgaaatacggtgacgaacgtcgcacgaagatcctcccctactcgggcgagatgaacgtcgaagacctgatcgccgaggagaacgtggtggtcaccgtcacgcactccggcttcatcaagcgcaccaaggccaacgaataccgcgcacagcatcgcggcggcaagggcatcaagggcgccaagctgcgtgaggatgacgtggtggatcacttcttcctcacgtccacgcataactggctgctgttcttcaccaacaagggccgcgtctaccgcatcaaggcgtacgagctgcccgaaggctcgcgcgattccaagggccagcacgtggcgaacctgctgcagttcggtcccgacgagacgattcagaccgtgctgtcgattccgaactacgaggtcgccaagtatctggtgcttgccacccgcaccggcaaggtcaagaagaccgcgctggccgagtacgattcgccgcgtcagggcggactcatcgcggttcgtctcgcggccgacgaggagaccggcgagcccacggacgagctgatcggcgccgcgctgtgcaacgccgcagacgacatcatcctcgtctccaagcagggcatgagtctcaagttcgcggcggacaacgaccagctgcgtccgatgggacgccagaccgccggcgtgcagggcatgaagttccgcggggatgacgaactgctcgccatggacgtggttccggaggactccaagcaggacctgctcgtggtcaccaatgagggcttcgccaagcgcaccgcgatcagcgaataccgactgcaggggcgtaacggcttcggcgtcaaggcggtacagctcgccgaaggtcgcggatcgctggtcggtgccctgatcgtaagcgaagacgatcaggtcatggcgatcatgaagtccggcaaagtgatccgttccaacgtcaccgaagtcaagcgcaccggccgcactacgcagggtgtgacgctcgctaagcccgacaagggcgacgagattatctccatcgcccgcaacgaggaaaccggcgaagacgaagtcgagacgacggatgatacggctgcggccgcatccgcgaccacgtctcccgatacggccgaaaacactccggataccgcggatagcgtcgcatccggcagtgattcgggcgcggcatctgacgagaatgtgaacaacactgatgacgaggcataatcgtctcagaaaactggtagcctcggctaagagtcatcggggaacgacaaggagcaacgatgagtgacaacctcgaacccggacggaccgacatgttcgtgcccggtccgcatgacaatgcagaaccgcacgaaggtgtccgcgaaagcgcccctcgggtcgcgcgctctatttccaaccagccgcagtcggagagcgagccgcgcgccaacaaaacgcgtgcgtccctgcgttcgccgcgccgttcgacgccgcgcgcccgccgcatgaacctgtcgctgacccatgtgaacgcatggtccgtggcgaaggtgacgttcatgctgtcaatcgccggcgcgatcatcgaagtgcttgccgccgccttggtctggctgctgcttgacgcggtcggcgtgttcgaccagctgaacaatatcgtctcgtccaccggtctggccgccgacagcctgaacctttccagcgtgttcagcctgtccacggtactgtcggtggttaccatcctggcgatcgtcggcgtcgtgctggtgacgctccttgccaccatcatcgcgctgctgtacaacgtgatcagcgcgctggtcggcggcatacatatcactctgggcgacgactgatccaatcgaatccctgatacatcccgttacgaaccccgcggaggcaacgcccgcggggtttgtatatctcatcatcgccggcgcaggaaaagactacaccgccgcttcgtggaagccgtccgctcaggccttcaaggaggccaaggttcgtggcgttgccgctgattggcgacagcgccacatgaccgcgttgccgacgcgggttgtcagcacatgacgacgaataatgggagttcccgatgctcgggagcccccattatgttgttgataggaaaatcacgctctcaaaactcgcagatacagaccatttttgttgaattcggccctgtatctgcgagttttgagagcgtgagctcgcgataatcaggccgtgaacctcaccgaagcccatgtgaccggtggcaacgaaacagtcatccgaccctcatcaagcgcggcggatagcggctgcaaggtgacgccgtccggctcgtcggccgtattggtgcggtagatatcgtcgctgggcagcatctgcgagctggtgacggacggccactcccccagcctaggcaacgatgtcaggtcgattgtcacatcatgggcgttgtgctcgtcacggttgacgagcagaatcatgccttcgcgagtcttttgatcccaagtggccaccgcgaccgtgaagagccgtaaggccggcagcggcaccggttccgcatgggcacagtacacggacgaactcgccaccgcatcgaccaccgccgacacgaaggcggtgagccgcagtacgtgaccaccacgttcaccgtgcccgccgacgccgcgcctgaaggcgctctgtggctgagcttctccgacatgggcctcgtcgatgacgccaacggctacatcgtcgatgtggtgctcgtccgctccgactccaagccgacgctgaagaccaccgcgttcacgccgaccgtcgccgagggtgaaaccgcctccgcatacgtggagctcgacggtcagcccgccgccaaggaggtctccgccaacaagaacgcaaccgtcgacgaagtggccaccgcactgaaaatctcaccgccgcacagaacgccctggccgagaagccgaagccggcggccgtcgaatcgatcaaggtggccgcgaagcccgccaagaccgagtacacggtcggcgacacgttctccgccgatggtctgaaggtcgtcaaggtcatgtccgacaagaccgaaccaggaaagaagcttggcgcgcagaagcctgccggtcagcagaacatctgtccaagaccggtgcctcggtggctggcgtggccggtttgcgttcctatgtgcgcgccgaaacgacgatcgtgcgcacttaagaacgcaaacagagccatttgcgttcttatgttcgcgcacttgtcgtttcggcgcgcacataggaacgcaaaccggccgtacctgttgctgttgcgttgctgcgccgtcacgccgttgtgccgtcacgatgtcgctgccgtccggggaatgtcgaaggacgcgaaacgggcctgcggcaaatcatgccacaggcccgtttctcaatgccggaccacgtcggctaaatccgtgatccgcgaaaacccgcgaaaatcagcggtgggtggtgccctcgtaggtgtcgctccacgtcagcgacgccacgccgtcggcgatggaaatcggcatctgtacgatcggcgagttgccgaggtcatgctcctgccagcggtcgccgatgaacaggaagtgctcgctgttgtacgggtcgtcgtccagcggcaccacgatatcgacctgcgaatcgtaggtcttcgcaccctccggcgcgaacagcttccactcgctccacgggccgtgcaggtcggtggcggtggagtacttgttgtcgttggtgtcccagctggtcagttgcgagccgaaccagtagtacaggccgtccttcttgatgatggtcggcgattccaggccgtatgggtagtcggtggcacgctcacaggcgacgtcctcgacgatggtgaggtagtcgtcggcgagacggtaaatgtgcgtgccatggtcgcggtcctcgctcatgatgtagccgctgccgtcctcgtcctggaagacgccgatgtcacggctcaggtagccacgccacgtgatggtggtctggaatgcgaacgggccggttggggcgtcggccacggcgacgccgatgtgcgcgtatccgtagtcgggcgtttcggcatgaatatacatgacatatttgccggtggcggggcaatgcagcaccttcggccgctcgccgatacggtcagcggcgagggcggagccgtcttcttgcacatcaagtacgatgccgtggctgcgccatgcgatgaaatcggtggttgtataacagcacacgccctggaacaaattgccgtttaccttgttctcgccatatgcataccaggtgtcgccgaatttttgcagaccgatgccgtgcagctgggcaacgtcgcccgaggtgtcgtgaggcagaaaagctccgaatctatcagccatgatttcccctttcgtgatgatctgctgttgattatctgtcgtgtccgcaactgcttgtgaccggttacagactgaaccattgtatcgtgaaaaccttgccgacatacggaagaatcggagtgcgcccggcggtggcgctccggcaacggccgcgtggggtcgtgcgttgcaatatgaggctctcaaaattcgcaggtacaagggactattcgttattttcgccctgtatctgcgagttttgagagcgtagttcttcctagatcacgccgattggcgttccgcgatggtcgtcggcagcagctgcacgtaatgcggctccacgatgtcgccttgcagcatggacagcaacagcctcgacatcgtctcgccgtgcagctgcgaatcctgccgcacggtggtcagcttcgggttcgccagcagggcgattggcgaatcgccgaatcccgtgaccgcgatgtcgtccggcacccgatacccgaaccggttcaactggttgatgacgcccagcgcgatgctgtcgttggcgcacacgaatccgtccagctcgtcaagcatgggttggaactcgaccacggccatttcgccgctggtgccctcccagtcgtccgcgtagtagacgtggcgctcgttgaaccggtcacccatcgccgccttgaagccgtcgaagcggttgttcgacgatggtgagtatccggggccgcacacgtacaccagcttggtcctcccctggtcgagcaggtagcgcgtgatgtcgcgctgcccctcggtgttggtgaagtccacggccgggaacggcaggttctcgcgttctctgacttccgagaggaccaccggccgcttgaccgatgcgaacgtgttggcgagcatgctgtcctcgctcagtgagaacagcaggtacccgtccgaaaagtcgctttgcaccagctgcgcgatgcggcgcgtggagtcctcgctgttggcgatcagcgtgaccatctggtagcccgcgtcgccgaggacctggttggcgccggccatcgcccttgacatactggcctgcgcgatggtctcgttcgattcgacctggatgatcagcgcgacggtgagtgtgcggcgttgcgcgagtgagcgtgcggcgttgttcggcgtgtactgtgatttggtgatggctgctgcgatgcgttcggctgcgtcctgcgagacgtgggtgttgccgttcagataccgggagaccgttccgtacgatactcccgcgagacgggcgacgtcgcggatggtcggctttttctgtgcatcgtccatggaatccatggcatcggtgtttgcttcgtgttgctggatattcgccggttgcttatcgctgttctggtctaccggtgtttcgttggaacgtgcagacgacttcgtccgagtgcggttcgccagacgccgggtcggtttgccgctcgttgatgctaccttgttcggcgcgtgaatagttgttgacatcattgttcctttacgcgtgcggccgtcgtcggacgaccgcgtacaggttcgagtatacgcagatgatgtaaacggttacaaggggtgtctgtcgttgtgccggccgtggcatgcggagcctttccgcagtcgcggttcgccgcccgaccgccgtgtggctcgccatccgtggctcgcctgtgtcgacgcattccgacatggccgcacaatctgttgtattttgcgttcgcgctcggataatgcggggcatagtcgtcctgtcggttcccgcgacgcgagtacattgaaatcatgaccgatccgctgcatatccaactcaccgcgcgccccaccgtggacgactggcagcccgactgcgtaatggacggctaccagcaggcgacgatccatctcggccatgatgacgaaggcgatatcgtcgccacattcgtgcgccgggacccctcgaagctgcccatgagagcgcgatggaggcgtcagcggttcgcgctgcgcgggcaccggctcgcggtgatgtacgtgcacgggtggaacgactatttctaccgccgtcacgaatccgagttctgggaatcgctcggcattcccttctacgccgtcgacctgcgcaagttcgggcggtcgttgcgggatggccagacccctggatatatcgaggatctgcacgattatgcggcggaattcaacgccctacgcgacctggtcgtcgccgagcagggcgagcaggtgcgcatcctgctggtcgcccattcgcagggcgggctgagctcggtgctgtggctgaattcgcagcggccgcatcacgtcgaggcggtcgcgctggactcgccttggctggaattgcaaggcaaccgcatgttccgcatactgtcgacgcccgtggttcaggcgttccagctgggcggcggcaaaacggtgatgccgatgcgcgatccggggttctacggccgctgcatcgattgcgagaccggcggcgactgggattatctgcgccatccgctggtggacccgcagcgtttctttccccgcgccgggtggatgcgggcgatctacaatgcgcaggccgaggtgtcgcgccggctcgacatccgcattcccgtgctggtgtgcacgtccgaccggaccatgctgcagcccacatgggatgaggcgatgcgcgaggcggattccgtgctggacatcacggcgattcgccaggcggcgctcaacctcggcgatgtggtgacgctggcgacgattcgcggcggcctgcatgatctgagcctgtcgcggccggccgcgcggcgtaggtatttcaggatcgtggccgactgggcctctctgatggcgtggcggagggtgattccgcctgcgcatctgcgcaccgcgttggacgcagtcgcggcggccggcagccatgtcggtggcgtgaatcccgatgtcggccccgacgcaaaatcctgaggtcccgcaacggctcgcggccggcgtccagccgcgagcctgcgcaggtcacgccgactgccgcaccaccagctcggtcggcaacatcaccgtacgcggcgagtcgatgccgtgaatctttttgatgacgatgtcggccattaccttgccgcgcatctccatgtgctgatcgacagtggtgatctgcgggttcgactccctcagcatccgcgcgccgtggctggcggtaaaaagccatttctgccattggatttccttatggcggtttgggttagatgacgggcaaccccttgctgcaatgagagggcttataaatccgtttgttttaagcaaaaccccgagagtgacgcaacactcttggggtattttcatcagacggggaaccccgccaaacacgttcgaataaacaaaatcccggcagccaaaagcaaccgggattcatcaacgcggcctacgcgcccaacggcacggcctcctcacgtgcggtatcaggtgcgacgtctatatcaccgtcaccccacaacaccgtaccgagaccagcccgcgcagtagcgaacaccgcaggatcattcaacccagcgaacgccggatagccaaaatacttagccatatccaagacgccgctataaccatcgctgaacctgaccgccacacggtggccgtccaacggaacagcgtcagtcaccaaaacaacaccgtcacacatgaataaacctccttacctaagcggctcgatgtgtccggattgcacatgggcctccacacacttccaattggactcgagatcctcacggtgtatttcagcccacgccaacaccaaacgttcctgtttcctaggcaaaccgcccttaatcaaatcgccatcaaacgagtacttagcccaatggccattatattccgcgtgaaaatgtttcacggggccatggtcattggcatacatgtaaatgacgataccgaaaaacctactgattcccggcaactatgccacctccttactcttacgccgatcatatcggctgaacattagcatttcgtgggccagccacgctataaagacacgtctagccctggcggattacattcaatccgccgaagtctcggaatcaggatcaagcagcttacgtggattagcaacgcgcaaagcgtcacacaatcgcagtgcagtatcaagcgacaccgcccggacgttgcgtttacccgtttcgatctgcgcaatctcaacggatgcacgccgctacgttgcgctagctcacgctgtgtcattccacgtttcaatctcaattctttcaatcccatggccctactcctaacttggattagagggcattgtagaccactcagatggcgcgggacaattccatgccggataccgcgccacgttggcgactcggcgacggttcggccttgcatgatatgaggttacggaatcccacaaagccccgagtgtgatggagctgttgttggcgctgccgaatctggcccgttcctgtagcagttccgtcagccgcttgttggcgtcaacgtattttttgcggctgtatgtcttaccgtcaaccttgaactcgtagctggcgtagatttttacggttccgtcggacagtctcttccggcgttcgacccgatatgggtagacgatgccgtttcttgctttgcgtaccatgattgcctccctgcctctcaccattctcagacattctcagacatccatttacctcttacttacggtttaagtacatcctaagtacggtgaaaccgttggaatgaagccgttttgcccaatcgctccaagtgccattctaccagactttctaactgttaatcggacggtcactggttcaagcccagtcgcaggagcttaggctttcaggccttttggcagtagggttgccgcggttgacgccgatggtgccgttgtggattacgcgaagccgttcgcgaaggtcggcaaggccacgttcacggtgacgctcaaggacaccgagtactccaagaccttcgaagtgagcgtcaaggccgccgacaagaccgcgctgaacaacgcgatcgccgccgccgaaaagctgaccgaggacaagtacgagtccggctgggatgcgttccaggccgccttcgacgctgcgaagaaggtcgccgccgacgaggacgcgactcccgcccaggtggctgacgcgcttgccgcgctgcaggccgcccggaaggctctggtgaaggtcgatggcgagaagcccggcccgcaggagccgtccaccaagcccgagccgcagaagccggcggtcaagccgagcccgaacggcaaggtggatgccaccgagacgagcggcctgagcaagacgggtgcctcgacgatggcgttcgccgtggacgcggtcctgctgctggccgccggtgtcggcgtggtgctgctggccgccggtgccggcgtggtgctgctgcgtcgccgcgccgagtaaggcgcgagccgccatcccaagattctggcatgtcgggatggccgccgctgagaaatcggtggcggccatcattccccgccggcatgtcgtgacgactgattgcatggggggggcgcttgatgcggacgggatgctcccgagagccgccttcccgccagtattttccgttgttgcgggaatcgcgctctcaaaactcgcagatacgggccgtttttgttggatttagccttgtatctgcgagttttgagagcgcggggttggtgacagcccgtgcctcatcccgtaaaggtcccgtttctggcctgcgggatgggactttctccggatgcgggggcaatcgacatgatggcgacccggtgatcgcgcgccgcccccgttgtcggggagctgtcgcgaagcgactggggtggccaaacctgctgcaggacacgaaaggcccgccgaaaccaatgcgaatactggtttcggcgggccttcgcgttatccgcgaatgcgcgccaaacgttacgcgcctacgcgatcacaggatgccctgcgcgaccatggcgttggcgaccttgacgaagccggcggcgttggcgccgagcatcaggtcaccctcgtggccgtactccttggcggcggccagggagtcggcgacgatggtctccatgatgttcttgagcttggcgtcgacctcttcgaaggaccacgacagacggtagctgttctggctcatctccagaccggaaacggcgacgccaccggcgttcgccgccttggcggggccgtacagcagaccgttcttctggtagacctcgatggcctccggggtggacggcatgttcgcgccttcgacgacgaccttgcagccgttcttcaccagagcttcggcggactcgccgttgacttcgttctgggtggcgcacggcaacgcgatgtcacacggcacggtccacacgccggagcaaccctcgtgatactcggcggacggcacgcgctcggcgtactccttgatgcggccgcgctcgacttccttgatctgtttgaccacggccacgtcgatgccgttcggatcgtagacatagccgttggagtcggagacggtgacgaccttggcgcccagctcctcggccttctgcacggcgtagatcgccacgttgccggagccggagaccacgacggtcttgccctcgaaggagtcgttcttcagcacgcgcagggcttcctgggtgtagtagcacacgccgtagccggtggcctcggtgcgggcgagcgagccgccgaactccagacccttgccggtcaggacgccggagtactcgtcgcggatgcgcttgtactggccgaacaggtagccgatctcgcggccacccacgttgatgtcgccggcgggaacgtcggtgaactggccgatgtggcggcacagctcggtcatgaacgcctggcagaaacgcatcacttcagcgtcggaacggcccttcgggttgaagtcggagccgcccttgccgccgcccatgggcagcgtggtcagagagttcttgaggatctgctcgaagccgaggaacttgatgacactctcgttgacggtcgggtggaagcgcaggccgcccttgtacggtccgatggcggagttgaactgcacgcggtaaccacggttcacctgcaccttgccctcatcatcggtccaggccacgcggaacttcaccacgcgctccggctcgacgatgcgctccagcacgcctgccttctcgtactccgggtgcttctcgactaccggctggatggtctcgaacacctcgcgtacagcctgcaggaactccggctggtcgccgtcgcgctgttcgacctgagcgtagacgcgcttcacgtactcgtcagtgagcataattctccccttaatggttgggttatcaataagacggttttattgtaggtgcggtgtcaaggggcgacaagaaattgctcaggatgtggcgcggatgtgtgcgtcagctgagctgcagcgtttcggcgacttcgtcgacgatgcggtgcatggcctggcgcgcgttgtccggactgctctgccagatcgcttgggcgacggcgtcgtgtgcgtcgagggcttccggcttgggcttttgcgggtacatgtgcagttcgacgcgtccggagagcacggtggcgatgatggtggatagggaagcgaacatctcgttgccgctgttgcgcaagatcagcgagtggaattcgatgtcgagcttgtggaattcgtcgagcccgccgttctcgccggtgtgtcggagctccgctgcgagcagggggagccgcgatttcacgtcgatcggcgcgtatcgggcggccgaggtcgctgcggccggctcgatggcgagacgtagttcggtgagggcgcgcagctgctcctcacggtgtgtggagtgcagcttccaatggatgacctgggtgctgagcgcgtcccactcctcgaccggttgggagacgagcccgatgcgtcgacggacggtgacgactttggctgtttcgaggcttttcgcgacttcgcgtgccacggttcgcgagacgtcgaaccggcgctggaactcggcgtccccacgacggccaccgcggcggcgctttactcccggcaggcttcgcgcggcggcgccgacgacatcctgcgtgtggtctccacgatgcgcgcccaattcggcggccacgtgacccgtgcctgaagcggggcagccgcggaatgccacgagaatgatgcgatagtctgggaggtgacgatgcgcgggttgcaatccgcgcatccgggcgcggacacgagcctgcgcccgcgaatcctctcaccataggaggcgtcatgatcgatggtttcaagaagttcatttcccgcggcaatatgattgacatggcggtcggcgtcgtcatgggcggtgcggtcaccgccgtcgtcaatgcgatcgtcaaccatctcatcaatccgctgatcgccatgatcttcggcaagccgaacatggacggtctgcttgcgttcacgttcaacggggcgaccgtgtcggtcggtgcgattctgggcgcattgctcaatttcctcatcatcgccgtcgccgtctacttcttcatcctggtgccaatcaacaagttccgtgacatgtccgatgcgctgctggcgaaggcgaagctcaaggaaagtgaggccgaggacgccgacgaaggcaaggagcccgagcccaccgccgagcagcagacaatcgcgctgctcaccgaaatccgcgaccaactggccaaagcctaaccagaactcgcaccaccgctggcggggctatcggcgagccgactgggcgccggcaatcgcatgctcctagtcggcgaactcgctgttttccggggataatgcgtcacgctgcgcgggtaccgtcaccgtgtgcgggggcgcacagcgtgacggcattccggaaccattgcaatcactggattcttgaagaatgcgtcaccgtgtgcgggcgcgcacggtgacggtacccgcacagcgtgacgctctgatgtcgcgaatcgcacctgattccgttctcataggcggcgcgcacttagggacgcaacaacgggttatgcgccccgcggccagagggtggccgaccatgcgaccttcgaccgcggggcacgcgctccgtcagctccgcttacgacggaatgtggcgatgagaccgcctccgatggcgagcattgcggtacaggtcagcgcgaccaggacgctggcaccagtatgcgacaactttgttttgccgttgtctgcctgttgcccatttgtcttgtcatccggcttctggtgggctgcttgatccgtcttctcgtctggtgccggcttgggggcaggttccggcgtgggctcggggcccggcgagggatcaggctcaggctccggagtctccccaccttccttcgcctgcacgacgaccgtaaaggtcttggaggtagtggctccctgactgtcggtgatggtgatagtgacgtgataggttcccggagtatcgggatccacatcatcggcggtcacattcgccgcagcgagcggcatgtcgccatcctccgcgtcgtgcgcggtcacgccgtcaagcggatcaaaagcgtcaccgaccgtaatggtccggtcactggcggtgatgacgggtgccgcgttgatcgttccggcagcacgcggccgaatcttcagcgtcgtcaacgaatgcggcgtgacggtgaccgtcggcgtcgccgcatcgaacgtgacgctgctgtcaacgggagtcacattatcttggttttccaacgtgttctctgcgttgattgctgcgtccatggtctgcacatccgcgactcggccagacagatcctgcccgaaattcaacttcagcgtgcggccgagcgcgcgatccagattgacgatgatcacgcgcagattgccatcatcatccttggaaaccaaagcagacagagccgttgcgccattgcccaacgtgggcgtcgagccgagcgtcgaagtcagcacgctgtcgccgatgccgttgccgagcatctgcagggcatacgcgctcggcgtcaggaagaacccaaaccgcccctcgcccgtcaccgtgcttgcgccgtcttccggcacggcctgaataaccgcctgctgggtcgggccgagcgagtcggcgccgctgctgtaccagtcgatcaggcagtgcttctgaatataggggctgccaagccgaacatattccagcgcgaccttggcgatgtacagcgcgtgcgattgcgaccggaccagcgcgctggtatcgcggaaaatgccgtattcgctgatgaccggcaccttgcctgccggcatgagtctcacatactccttgacgcggttgacgcccgccgtctcggccttcttcatcgcgtcgtcgtaccatgcgcccgcggtggctcccgtgggggtgccggaataagggtggatggtcatgccgtcgtaccactggttcgcgttcaggttcgccatgcgggtgatgaaccctgtggactcgtagctggtgtacacgttcgccgtgtgccgtgtgccgtccgtgcgctgttcggccgtgttgatctggtcggtggtgttcttgatggccttcgatatcttgacgaacccgtcgcggtcaacggtgtaactgacataaacctgctgtcctttggccggaatcgcaccatgcacgccgtctccgaacctcagcgcgcccgtgctgtaatcgacctgcacgactttgtcgccggcaccggcggtctccaagtcgtccacgatgcgccactgttcgttcgactggtcgttgccgacccatacgctgacgctgcccttgttgacggccacgaacgacgggtcgtcgacgatcgcgccatcgtcgccgttcattttcgggttgacgttggcgtagcgcatgtaacgggtcagaccggccttgccgtcgctgaccgacgctgccttgttccaatcctccaggctcacggcgtactgcttggtgaagctcgctgtgccgccctccgtgtacgcctgctcgctgccgccgctcaccgcggtggtccagtagccctgcgaggcggtgccgtcggagttggcccatgcttggttcatttcgttgccgatttcgaaatagcgcacgttgtacggctgcgggtgtccgttgtctgcgcgcaccttcgcccagtcgatgccgccgttgggattggtgccgacctgcgcgttcagatattcgatcagatccgccgcgtcctgtgcgttgccgcggccgaggctgtacacatagacgatttctgaattgacctcgtccgcgaacgtcgcgatttcaccgatgccgaaattcggttcgatgccgccctggccggggttgttgtagaagccgtgtatctgcttgagccgttgggcgcgcggaccgatggtggtcttccagttgaacaggttggaaatcgtgcctccggggtagcgaatcgagccgaatccgacctgcttgtacagtgcggtgaagtcgtctttcacacgcatcgtatcggggtcgaaactgccgtacccgttgaaggcgtaccgatgattgacgccgaagatggaagcgctgtcgaccgtgcgctccacggtgctggggtcggccgtgagcgtgatcggtacatgcgcctgatacgcggtgatggccgtctggagcgccgtgcccgcggcattcatcgccgtcatccgcgcgacggcgctgccggaggtgttgttcatggcgttgaccgcgttgcgttttgccgtggcgagtgcttgcgcctgcgccgacgcggcgtcgacctctcccgcggccagcagcgcgtcggcctgcgagaccagtgtgccgagttgttttctgacaagggccgtgccttgctcggcgtaaatcgcagctgcctggtcgtcggtgagcgtggcatcatatacgcggatgtcgtccacgtcgcccttcatcgaatgcgggtccatggtgccgatgttcttgtgcgagccgaccagcagcgcggtgacggcgttgacggccgaggttcccatgttcttttcgctgtcgagcgcgccgttgacatagaacttgaccttgtggctcgtctggtcgaaggaaacggcgatatgctgccatccgccgcgtgccaccgtattgttgctgagaacgtcggtcgcgttgacatacgtgtggtactggttggacgggcgcagcgtaagcagggagcggccggcgccatcctgctgcaacagcaccgcaggcttgtcgcctgtcgggtcgagcgtcgtatcgtaccggtaccacatcgcgaatgacgcgttgccggctccggtgttgacgtactggttgattttcatgtagctggacgcgcccgcgccgaagtgcagtacgttgccgaatacgccggaggggtcggcgatgatggagatgtcgtcgccgatgagttgggccgttgcgctgctggagccgccgttgttggccgcttcgcggtcgccggccgcggtgttctcgaagttccatgcgcctcgaaggtttgcggacgcggtggttgctggtgcggtggcgtcggcgtcggccgcataggctgcggctcccggcgacagcgccatcgctgctgtggcgatggccgccatgattgagcgccagggcttgccgctccgacggtgtgatgtgatatgcgtcattacatgctctctgcttctgtttcggggatcactgccatgtgatcgttggggtgagccttgcctctgtgtgaaggtctgctcaattctatcaatgcgattccgtgatgcaagtaacggcggggcgctgaaccggtgagagccggctctgtgccatccgcgtgccattagccctgacgattttggctgattcgagatggaaacgagcagaaaatgcaaatagaaaaaccctcagaatcagcttgattctaagggttctgagagtggagctagccgggttcgaaccggcgaccctctgcttgcaaagcagatgcgctaccagctgcgctatagccccgtgattccgccgttgcggcgttgtcagtgagaaaaaaagagcggctgacgtagccgctgcaattttcctgtgggcccgggaggacttgaacctccgacctcatccttatcagggatgcgctctaaccacctgagctacgggcccgatccatacacttcaaaagcgcacgatgaactagaataccagaattgccgtatgtgtcaaatccagtcggttttttgtggctttcggcgtgtcgttctcgtcgttgtgtgtcttcacatggcttcctgcgccgacaatcgcgggtgcgccgataagggacatgggttactgtaggtgatggctatagtgatgtctggcgcatcggcggccagaccgacttcctgcgacgaaagggtgtacagtgcagtatcgatactgttgtggcgatgaagacatgtcattcgatctcattccggaaccgcaatccgtgacattgaacggggaggctgccgattcggatgatgccggagctccggtacccgtcgcgttgccgctcgtaggccgcatctcggaagatcgcgacatcgatgacatcgccggcgttttcccgacccagcttgccgatgatatcgaagcggcgacgggcctgcgctgggacatcgccagcgatgtcatggtggccggactgcccgcgccaaatgccgcgactgcgcacccggttccgccacacgcttcatgctggaagtcgttcatcacattgagactcgacccctcatccctggagccgcaggaataccgcctgaccatcgcacgctccggcatagacgtcgtcggcggcgatacggaaggcgtgcgcaacggcgtgcagacccttcgccagatcatccgtcagtgcgcgccggcgctgcctcgactcgtcatcgcggacaagccggcgtacaaggtccgcggctactatctcgacgccacgcgcggccgcgtccccacgctcgactggctgaaaacatgggccgaccggctgtgcctgtacaagtacaaccagcttcagctatacatcgagcacacgttcatgttcgacgatctgagcgagacttggcgcggcaccagcccgctcaagcccgccgacatcatcgcgttcgacgaatactgcgcgcggctcggcatcgagctggtgccgtcggtctcgactttcggacaccagtacatggcgatgcgcacgcgcgagctgcgccatctcggcgagtttcccgaggacgccgaccgtcagtacggtttcgtggagcggcagcgtcaccacacgctcaacatcaccgaaccggagtccctcgcgttctcgttcaagctgatcgatgcttacatgcagctgttccgcacacgcaagttcaacatctgcggcgatgagacgttcgacttgggtcgcggccgttccaagcccgaagccgaacgccgcggcgtggccgcgatgtacgccgacttcgtatcgcagctgtgccgtcacttgtctgagcgtggccgcgagccgatgttctggggtgacatcgctgtggagatgccgcagatcctcggcctgttgccggataacgtcacgctgctcaactggttgtacgcgccgggcatcggcgaagacaaggtacgcctcgtcgcgcaggccggggccccgcagtacgtgtgctcggcggtatggtgctggaatgcgctgctgccgcgcctcgacgactcgtggaacaacatctcccgactcgcgcgctacggcgtgaagtacggtgcggtcgggtacctggtgaccgactggggtgattacgggcatgtcaacgatccgcgcatggcggtttccggcatgatattcggcgcgcagtgcgcgtggaatccgatggctcatatccagggtgaggtcgggtgcggcgacggcgaagaaggctctgctgccggttatgccgatgccgccgccgatgccgtccgtgagaacaaggccgccgcggacggggattccccggcaccgctcccgtcgagctcggaaagcgacgattacaccggtggcgcggccgacgcgattgcgggcgcgccggccggcggcgatgggtcgtgtgccgagatgtgccgtcgcgtggccgaggtcgaatacggcgaccgttcgggcggcatagtcgaggcactgcgagatgccgcctgtcgtgtggcgttcagctgggatgacatggtctggtactgcgagctggatgaaggcgacggacggatgaatcgcgatgccgcatcggcgatgcatctcggcgtgcatgggttcagcggggaatacgggcgggagtgggaggcccgactgctgggcagtaccgatcttgatgaggctcggcgcacgatgctgcaagggctgtcgccgcatatcgtccgcgcggccgaggcgaacgaggcgctgctgtgcgacgccatgcgactcggcgccgccgccggtcgcgcatcgcgtttgggtgcggctcggcgtgatgtgccggcgatgctggccgccatcgaggggcagcgctggttcaacttggtcggcttgtgccttgcgcggcggcatgacgtcatcacggtcgatgccggcgatatcgcccgcgcgtcggccggattgatcgaaccggacgcaggctcttccgcagggccggaagccgtgcaggatgtctcgattcgagtggcacgtggtctggagcgctggttcgagacctactgcgacttgtggcgttctgtcagcgcggaatcggaattggcccgcatcgcctccatcgtgtggcgctgtgccgacgccctgcgttcataaacccaagcgcacatcagaggcggggcgtcgcgcggtagtggcatgagccggtcgttgttgccgtgccggcgctcgctggctgagacggcgcgaaaatgcgatccatgccgggtctcatatgtgagatccggcatttcgttgtgccgcaaggcatcgtcgcctcgtgcagtggcgtttttcaggtcctgacaggcgagcttgccgggtatctgcgcttcaagggggtgattttcggtcgccggaacatctatctgcatttcaaggggttgcggcacagaggcatccgaggtatatgagccattcacttattggaatgacgcggttctagcagtgttcctacttggtcaccaaccccttgaaacgtagatagatgttcgggaagtcgaaatcaccccctcgaaatgcagatagccgtgtaatccacgcctttcgcgcaatattcgtgccgctcagggcaccgacatcgagtttttcagctctcgtcgtcgggcagcgccatgtcgctggagccgaatcgcggcccgctggtcgattcgcgctgcattagctgcggcggatacgcggtgtgcgccggaagccagtgtttgctgctggcactgacgctgatgagtcgcagcgcttcatgggcgatgagccggcacggcgggagaatcgacgagagcggcgggtcggcgatggccgccgcgggggagtcgcccgacccaatgaccttgacctcgtccggcacacggattcccagttggttcagcgccatcagcgctccgatcgccacatcgtcggtggcgcagatgagcgcgttcgggcggttgcccttgtccccgaacagtctcataacgtcgtgatacccgcgcttcgcggaattgtcgccgaacgtggtccaacccggttcggtcatcaggttcatgaccctcgttgacgtctgcaacgtggcgaacagctcggcggcgctggcggagttgacgttgccgctgaggaatgcgatggagttggcgttgtactctgcaaggtgcgaaagcatcagcttcatggaggcgctttcgtcgacgccaacccagttcacgtggaaggacgtggagtggccgaacgcctgaaccagcgaggtcatgccgacgtggtcattcaggaacgctgcggtgttggcgtcttgcggcggcatgaccaccagcccgtcgacccggcgggcgagcatggcttcgatgcgttccgtctgggttcgctggtcgtcgccgaggcccagcagcagctggcgtcccgagcggttgacttcgggctccaactccgcgagcagtcgggctgccagagggtcggtcgggccgggcatgatgaggccgatggtattggtcgtgtcgctgcgcagtgcgctggcggcggagttggcctgatagttgagctgttccgccgcgtcccgcacgcgtttcgtgatgttgtcgtctttggtgcggcgccctgaaagaacgcgggagacagtggctttggatacgcgcgccaatgcggcgacgtcggtgatggaactcgttgagctcatcgttcatcacctcggattgtctgcttcgattacttctgccgggcaccgcgtcgctgcccgttgtatataggatacatgaacgcacattgcgctcattggtcgccgcgatgccgtatgggcgtgattattgccaatgtttccagtggacagacgtaatggtttctgtataaatcataccatttcattacaaaattgagaaatcggtttccgggtttactaagcggattttagggtgtatagtgacggatgaaagaaacgatttgctcgcgatggtgtcagcaaatcaccaacccatccagcggtggatggctcagcacggaggagatgctatggtcgccgatattgacgggttcctgccggacagcgcgtttctgctcgacgttcccgccaccgattggaaagatgccatccggcttgccggcaaaggactggtggcggctggtttcaccaccgacgcgtatacggatcagatgatcgagacggtcgagaaaatgggcccgtacatcgtcatcgccccgggtctcgcgctcgcgcactcccgcccgtccgaggccgtgctgaagaccggcctgagctgggtgcgcctgtccacgccggtgaagttcggcaacaaggccaacgacccggtatcgctggtcatcggtctggccggtcatgacgagaacgagcacatcaccgtgatgtccgccatcgcctcggccctgatcaatcccaagaagaccgcggcgctcgccaaggcccccacgccggaagccatccgcgacatcctgcatcaatagcagggcggcgcaacccgggccgggccgccggtgagcggcacacccacacttccataactgaatccaataactgaaacccaatggctgcgcggcagtcattccaacgaaagaaacgagggaatcatgaacatcctctgcgtatgcggcaacggcatcggcacatcggtgctgttgaaggtcaatgtcgaatcggtcgcggccgaccttggcatcgatgtcaatgtcaccacctccgatgcgggcagcgccaagggcaccgccaacatgaacgatctggtgctcacctccgccgagctcgcgcccgagctggaaggcaccaccacgcccgtcgaagtcatcacgaacttcatggacaccgacgagattaagtcggtgctggagaagtacgccgactgagccgctccccgttacggcctgcgtgagatgccggccagaaaccataacaagaaaagaaggaatccatgaacgttgtcgttcaagtgctgaatttcatcagccaggaaatactgaatgtgccggcgtatctgattggcatcatcgcggccatcggcctgatcgcactgaagcgcagcgccgggcaggtcgtgtcgggcgccctgaaggcggccatgggctacctgatcctgggtgccggcgctaccgtcgtcacctcggctttggccccgttcggcgacctggtgctcaagtccaccggcgcgcacggcgtcgtgcccaccaatgaggtcatcaccgcgcaggcgtccagccagtacggcgcctcctcggcgtacatcatcgtgctcagcttcatcgtgatgctgctgctcgcgcggttcaccccgctgaaatacatcttcctgaccggccaccacatggtgttcatgtccaccatgctggccgtggtgctgtccgtgggattcggcacggaccaccagctgctcatcgtgatcatcggcgccatcctcatgggcgtgatcatggtggtcatgccggcgttcgcgcagccgttcatgaacagggtgaccggtagcgacaagctgtcgatcggccacttcaacaccctcggctacattgtctccggtgctgtcggcgccggcgtgggcaagaagtcgaagtccactgaagacatcaacttcccgaagggcctgagcttcctgcgtgactccatggtctccaccacgctgctcatggtcgtgctgtacctggtcttctccgtgtgggccgccatcgtgctgccggccaaggaagcgttcaagatcttctccaccaaccccgacaactacggttcgttcttcatggccgcgttcgcgcaggccctgcagttcggcatcggtgtgagcatcatcctctacggtgttcgtatcatcctcggtgaactcgtccccgccttccagggcattgcgaacaaggtcgtgcccggcgcccgcccggcgctggacatcccgatcgtgttcccgtacggcgccaatgcttcgctgatcggcttcctcggctccttcgtcggtggcctggtggctctggcgatcatcgccgtgtggctcggcccggtctggggcgtcgcactgatcctgcccggcatggtgcctcacttcttcgatggtggtggtgctggtgtgttcggcaacgccacgggtggtcgtatcggtgccattgtcggctcgttcatcaacggcctgctgattaccttcctgccggccgcgctgatgaccgtgatgggcagcttcggtctggccaactccaccttcggtgacgccgacttctgctggttcggtacgattaccggcaacatggctcacctcggtcctgtcggtggcgccatctgcctgctgatctttgccgcggtgctcttcgccgccgcgtggatctggcaggtcaaggtcgtcaacaccggctggactccgggtgccaagcacgccgagtacatcgagcaggtgaaggccgaggagaaggccgccaaggccgctgctcgcgccgccaagaaggccgctgcggaagcgtgatactgttccgccgccgctgagcgattatgcgggagcgtgagggtgcgagtgccctcgcgctcccgtttttgtgtgtgggaacgcgtgagatcgcgggtggtttcgcggagtgcgcagtattgtgctcccgctagcggaagctgttgagcgcagcgagactgagggtggttctgtgcagtggctggtcagaccacccccagtcgctgcgcggcggcccccgccagcgggggcgttgtattccttgcctcatgctgactgggggcagcgtctgcgacaatggctcgtatgccattgcccaatcagcgtcgtcatgcccgaaaagcacccgcgtccgcctcaaccgccgccgcgtcgaccgtgcttgaggtggacggcctgcaattgcatgtgacgcgcaaacgcatcaagaacctctatctgcgtatcaagccgcctctgggaaccgtcgaggtgtcggcgccgatgcgcatgagccagcgtcagatcattggtttcgctcatgaacggcactcgtggatcgtgcaacagcagcggcgtatggccgaggcccgacggatgtcattgcggcaggccgagacgttgacgcccctccccagcgctcctgccggtgatggagggcatgccggtgtcgatggccgccggggcggcgatcagccgcagctccccatgttcgaccgttcggccatgtggaccgatgagcgcaaacatgccgccgcggccgcgatcgatgccgcgcttccggggctgttgcgcaagtgggcgcccatcgtcgggcgttcgccgagccatgtcaccttgcgggtcatgacgtcgcgctgggggtcatgcacgccgaaaaccgggcgtatccggctgaatcttcagcttggtctgatggagcctcgatttttggagtacgttctcgtccatgaaatgacccatctgtgggccaatggtcacggggctgattttcagcggcggatgagcgcttatctgccgagctggcgtgagctgcgccgtgaactcaacaagcgcgtactgctgtgaaacatatcgtgaaacatgctggccgacatgtcgcggcagcaaaacaaatgatggcggcggctcagcattgccactgaaccgtcgccatcattgatgtgcatcttttgcgtcagaccatgccggtgtgcatgggagcgggcattcacccgccatgcatgctgcctgctgtctgccgcgatctatcgcgtcacgccagatgcgaacgcatgaaccactggaacttctcaagctcctgcacgtggtcctggatgatgttggagctgatcacgtccagctcgtccagctcggcgatggccttgcggtcatcggcgatgaatgcgtcgtaatactcgatcagggcctcaaggtacttctcggtgccggcgcgaccgtcgacgtcgaacggcttccaggtgcggttgcgggtgatggcatcggcgcggccgtcaggcgtgccgcccagcgtggcgatgcgttcggcggtctcatcggcctgcgcgagcactgcctcgacctcagggtcgagcatctcgtgcacggcgatgaagttcggcccggtcacgttccagtgagcgtgcttcaggaccagcgcggcctcctgctcctggctcagtcggttctgcagaatggcaatggccttctcggaggcggcttcgtccagtcccggcacaacgaatgcaagtgtcatattcgttccttccttctgggatatcagtcaccctccagtttatcgatgaagcctgcgcgatgtgtcagctgccagcatagttatcgctcacagtgagcgacgtaacagaaacgtaggctgatgatcatcagcggtacaggtcgggtggaatcagtgtgccacaccaggctgatttcgcgccgtttttacgctggtgtggcacggactgggctgagagatgggacatgcggcggtgcgactgggcaaggcatgtgcagcgggggggcaacacgaaacacggcagacggcgtgactggacgtagctgcacattcagcaggtacaatacggcaggtcaattcgcgtcagtcaacgcggtcagtcgccactcgccgtcatccgcgtcggtgccggcggacacactggagtaaacagccggaccccgcggcgaaaaggagcgtgcagatatggtcgattcgcgtcgcgatgtggctggccaggccggccggagccccagcccatccgtgcaggctaccatgattggtctgatggcgattctgctgtggagtctgatgaccgggctggttcgcgtggtcgccgatgcgttcggcgcgacgctgggatcggcgttgatatacacctgtggcgcggtgctgctgctggtttttcgccggccggcaccgttgcgcaagtatccgcgaacgtatctgatcgtcggcggcctgctgttcgtgttctatgagtcgtcgatttccttgtcgatcgggctggcgtcttcggcggcctcgtcggtggaggtcagtctggtgaactacctgtggcctacaatgatggtgttgctggcggcggcattcgtaccgagcggcgagaagcgttcggcgcggaacgaggggataggacgggaacccgcagcgcccagcgacgcgcaggctcaagatgactcggtccagtgcggcacaaactgcagcgcaggcaagccgccccgccattctcgtggccgcgcggtgctccgcgtattgcctggcgctgtcgtcgccaccgccggcgtgatactggcggtcggcggcaacagcggcttggactgggcgctcgccgcagggcatgtcgcggcgaatccactgccgtatctgctggcatttgcgggcgcgctcgcatggtcggtgtatgcggtgttcacgcccgcgctgtccaagggattcgacggtacgtccgtattcttcccctttgtggccgtggcgctgtggatcatccacttcgcttccggccaaggttggccgtctgccgcgccgtcggtttggggctacttggctgtagtggcggccgcggcggtcatcgctggcggatacgcctgctggggctatggaatcttgcgcggcagcatgagcacgcttgcgatggcctcttacgccacgcccgtgctgtccacggcagccagcgcggtattgctggggttgtctttgatgttgccgttctggtgcggcgctctgctggtcgcagccggttcgatcatcaactggtggatttcctcgcagcgccgatgatcggcaatggccggcgacctcccgcccgcgccgcgctattcggcggaaaccggcgcgtggtcaggggcgccggccttgcgcacctcgatggtttcgatacggcggccgtcgaccttggtgacggtcatgtcgtacccgtcgtcggagtgcagcacatcgccctcggcacccatcttgccggtgtgtgcgaggaaatagccggcgacggtctcgtacgggccgtcctccagttcgatgccggtcagatcggcgaagtcctcgatggtcatgctcgcgtcgatggtggcgacgccgctcacgaatgcgggctgctccttgcgctcgccgcccggttcgctgggcaggtcgtattcgtcgcggatgtcgccgacgagctcttcggtcatgtcctccagcgtcacgatgccgtcggtgccgccgtactcgtcgatgaccacggccaagtggatgccgcgcttgcgcagcagttcgaggctcggcagcagcttggacgtgccgggcagcgaaatgccttctcgcgtcacgtcggccacggtcgttgcgttggggtcgcgcacgtccagcaggtcgcgcacatgcacgaagccgatcacgtcatcgaaatccctgccggtcaccggatagcgggagtacggcatctcgcgcacgtacgccgccgcgtccttgatgctctgcgaaccgtcgaggaacacgacatcggtgcgcggacgcatgacctcagcgacgatggtctcggacgcgtcgaacacgtcgtcgaggatcgtgcgctcgtctttgctcagcgacgtgttcgtgttgacgagcacgcgcagctcctcgtcggagacctcgctttcggtctcgttcgggtcgaagccgagcagacgcacgataccgttcgtgttcttgccgatgagccagatgatcggcttgcagaccttggcgaacacgtctatcgcgggcactacggcgcgggcgatctgttcggtgcgctgcatggcgatgcgcttcggcaccatttcggagatgactatcgagcagtacgagatgatcagcgtcagcacgatggtggtcagcggtgcggcgatgttcgccggcacgccccagcttttcacgacgggcacgatgaacggcgaaatcgacgattcgccgaacgatgcggacaggaagccggagagcgtcacgccgatctgcacggtggacaggaacttgttggggtcgcgtgcgattgccgccacacgtgcgccacgggcgtcctcctgttccatttgatcgatctgggatccgcgcagggagaccaaggccaattcggtgccggagaagatggatccgagcactaggaatatgaagatcagaaggatgtttaaaccaagtgacatggactctactgtaggggggtggcacgtcaattgtcgcagcgaatcattctcagtaagaaaggtgcgagcctgccaacgcccgaaacgaacatcaaaatcgacaaagtcccgagatgccgccctttatggttttgtgcgcttgtgcgcaaatgtgagaaatcctcgcacctttcttattgagaaccgttcgctgcgacttgccggccggtcacttgcatccgcaggactgcctggtgacgagttcggcggcgatgagctgcacgtcgggcgtgtgcgcggggtcgagcgccgcgttgaccgcgcagcgggcgagctcggcatcggtctgcgcggaggagacgaacatcgcgtcgacgttgcgctcgacgagttcgttgatgcggcggcactcgccttgcgggtcgcctcgcggcaggttgatgatcagcgcccgttcgcgtttggatgcagcggcttcgagctggtcggtgaattcggcgaagtatgggttcgagaagtcgggcacgatgacgccgagcgtgtgcgtggtgccggtcttgagggctcgggcgacggagttggggtggtagtcgagccgctgcgccgcgtcgaacacccgctgcgcggtgtccggtgagattttcttgggactgccgttgagcacgtagctgacgacggcggtggagacgcctgcgggacgcgccacgtcgaaacgggtggcgcgttgccgttgcggatgcggcgtctcgaatgcgtcacgctgtgcggggtgcgtcactgtgtgcgcccttgcagcgtgacgcatattgtataaccattggaaaataagggttttactgatgcgtcactgtgtgcggggccgcacagcgtgacgctacccgcacacagtgacgcgaaatgcggcgataagtcacgctcccgtcagaagctcagtacctcgaccttgccggtggacagctggtagcgggcgcctacgatcatcagtcgatcatgcgccagcgcgtcctgaatgatttcgctgcgcgtgaccagctcttcgatggtacgcgccacatgtacgcgttcgaagtcctcgctcgtatccaactcggcctcccgcgcctgccataccgacatgccgaccgagcgcagcacaatcgaattcgagctggcgatgcgctcatccaattcggccatcgcatcagcggactccaacgagctctccgggtcgctcgtgctgtcggcgatcagcgcgtcaagttgttcggcgcccagcgccaccgccccgcagccttcatgacccatgaccatgagcaggctgacgtgcagatgatccacggcatattccagcgatgccaataccgcgtcgtcgatgatctgcccggccgtgcggatcgtgaacaggtcaccgagccccgcgtcgaagatgatttccggcggaacgcgcgaatcggagcatgacaataccgccgcgtcggggttctgccggtcgatcagtgattcgcgggtctgcatgtcctgccacgggtgctcgctgtgcccttcggcgaatcgccggtttcccgccatcatgcggctaagcgtcgagttcgcggtggattcctgatccgggtcttcctctgccatgacatctccgttccgagtcccaggttcgcgtcgggtcggcgtgtatgtgcctgtatgtgtgagcatagcggaaacctgtttgataagtatgaaatatccaaggaacgttcatcacctctgctcatagcgaaaccgcggatcgggcgcggctgtttttaccggtttgtgagcgcaaactgtgatgattgtcatgaagaaaccctcgtgcgtccgtatcggcgaaagccgcttgacgttacgatggggagacgcaatgaccggattgcgtggaaaggaacgatgatgacactgcttcagcatgaactcactgattttactgtgcaggcttttcagaacaacgaattccatgaggtgaccaaggcggacgtgctcggtcactggtcggtgttcttcttctacccggcggacttcacgttcgtgtgcccgaccgagctggaggatctcgctgccaagtacgaggacttcaagaagatcggctgcgagatctactcggtctcctgcgacacccacttcgtgcacaaggcttggcacgacgccaacgaaaagatcgcgaagatccagtacccgatgcttgccgaccccaccgcactgctcgcgaaggacctcgacacctacaacgaggccgacggcgtggccgagcgcggtgacttcatcgtgaacccggagggcaaggtcgtggcctacgaggtcatctcctccaacgtcggccgtaacgccgacgagctgctgcgccgcgtgcaggcctcgcagttcgtctacgagcacggcgaccaggtgtgcccagccaagtggacccccggcgaggagaccatcgagccgagcctcgacctcgtcggtctcctctgatttcccgcctcactgacgggctgagttgtcaagcaaacagcagagctgtttgtaggcgaaggcgagccgacaggcaagcacaacaggctgcggctggaggccgtccctgattgcaggggctggagggctgtcggtagcggtcagagttggctggggatcgccaactctctcgcccccgctggcgggtagcgatgtaaggcgagtggcctctccgcccccgctggcgggggggggctggcggcgacagccgactgggggtggtcgcggtgataggcgaactaccccacccgcttcgcgggagccccgccggcaggggcatatgcatatgtaaggagttccatatcatgacccagatcaaccgaagcgatctgtatgacgttgttgtcatcggtggcggccctgcgggactcaccgccggcctgtatctcgctcgcgcccgctatcgcgtgctgattctcgaaaaggatgatttcggcgggcagatcaccatcaccgacgaagtcgtcaactacccgggcgtcggccgtacgtccggtcgtgcgctcacacagaccatgcgcaaccaggcaaaggatttcggcgcggaattcctctcagccgaggctaccggccttgacgtgaacggtgacatcaagaccgtgcacacgtcgcgcggtgacctgaagacgttcggcatcctgattgccaccggtgcaagcccgcgcaagcttggtttcgccggcgaggccgagtacgctggccgcggcgtggcctactgcgccacatgcgacggcgaattcttcaccggcagggaggtgctggtcgtcggcggcggtttcgccgcggcagaggaatccgtgttcctgaccaaatacgcctccaaagtcacggtgctcgtccgcgaaccggacttcacctgcgacgcggcggtggctgccgaagccaagaacaacccgaaaatcgacgtgcgctacaacgtcgagctcaaaggcgtcaccgccggcaagggtgggctacgcgaggcgacgatcctcgaccgcggaaccggtgagacggaatcgtggaagccatccgacgacggcacgtttggtgtcttcgtgttcgccggatacgtgccggccaccgagctcgtgcgcggtgtcgtcgaactggacgaccacggctacgtggtcacgcgcggatacctcgagacctcggtgccgggcgtgtacgcggccggtgacctgcgcgtcaagaacctgcgtcaggtcgtcaccgccaccgccgacggtgccatcgccgcagtggaactggagcggtacgccaagcagatgagcgagaaaaccggtcttgtgccgcctcgcccgaccgcatccgcatatgagcaggccgaagcgcagaccgcggctgccgtcaacagtgctgccgctgccggcaccacgcccgccccggctcctgtcaagcgcagcgccgataccgccgccgcgacggccgccgccaaaaagcccggcgagctcttctccgccgccatcaagcagcagctcggcgtggtctttggccgtatgacccgcccggtcacgctcgtcctcgaactggacgatacgccattgtcgacggagttgcagggattcatcggcgagatggtggcgctgtcgaacggcaaactgaattcggtcgcggtcgatgcggcgggcgtgatcaccgctgaggacggttccagcgcgccaacgtcgttgacggtcggcgagccgttggccgtcaccttgccggatggcgccgaactgccggtatatggttcgctggatgattccggtcgcgcgcagttcgacgtatcaggggtgctgccgtctgcgcggccggtcgtgcgcatgtgcgtgccggccgagaattccgacgccggtacgttgctgttcaccggcttggccttccacggtgtaccgtccggtcacgagttcaattcgttcgtgctcggcctgtacaacgccgcgggtccgggccagcctctggacgatgacctcaaggctcgcgccgaggccattgacacgccgatcgacgtgatgatcctcgtctcgctcacctgcacgatgtgtccggaaaccgtactggccgcgcagcgcatcgcgtcgctgaacccgaacgtgcgtgccgaagcctacgacgtcgcgcacttccccgagctcaaggaccagtatggcgcgatgagcgtcccctgcatcgtcatcaaccagcccggcggcgagcagaaggtcgaattcggcaagaagagtgtcccgcagatgttgacattgctcggcgcatagcgggcgctgtgcccggcgctgtcctttcatcccctttcaataatcctaacatgttagaattctccgttaacatgttagaacttcgttgaccgtggccggcggacatggtgctttcgacgcgccacacggcatcaataagggggcccgctaggcgcaggcccccggatcagtcaactatgagagtctattgtcgcggatgtgggcagttacctcgttcttggccgaatactgtccggggcgattcaggaaagtgatttactttcagtatctgaagccctccgccttgcgttacggttcaggccccgatggatctcttgccctcgccgttcctgccgccgagatacttgaccaggctgatgctgatcagagccagggcgaacaggccggtgagcaccggaatcagcgcggcatagcgatgggcctgatcgggcgtgtgcgtgaccacgaacgaggccagctggttgccggacaggccggcgaacgcccaggcgctcagcgcgagaccgtgcgtggtggagacggtcttggtgccgaagtgctggtcgagcagcaccggcagcgtcgagaaaccgccgccgtagccagcgttgatgaggaacagcatggccagcacggcccacaacagcgcattgttgatgctgttggtgaagatctgcagcaggcataccgcgatcgacatgatgaagatcacctgataaacggtctcgcggcgcttcaggtggtcggagagcgtggagaagcccacgcggccggccgtgttgaacacggagtccacggcgagcaccaggccgatgatgccggcgatggcggcggcgaacttggcggggctcaggccggcatactgcgggaaggccttgagcacatcgtgcaggatgtccttctcctggctgataagcgccaggccgcaggtgatattgatgtagaaggcgatccagatgccccaaaacacgggcttcctgagaatctccgcgcggcttacatgcgaggtcgcgggatcgtagacccagtcagccggacgcttgatgagcaggaaaccgaagaacatcatcaccgcataaatcacggcgaggatgaagaacatgttgaccagccccaccgtgccgatcaggtactccatcaacgggctggcgatggccttggccaggccgaagccggcgacggcgatgccggtggcgaggcccttgttatcggagaaccagagcatcaggttcttgaccggggtcaggtagccgacgcccaggccgatgcccatgatcgcgccgtagcagatgaacacacccggcaggaatcccagtgcgatgctcacgcccgtgccggcgaagccgaccacgaagcagaccatggagacgagtgcggatttcttgatgttcttctccaccatggggccggcgaatgcggctgacatgccgaggaagaagatggcgagcgagaagccccattccacggaggccgggctggcgttgagcctgtcggcgatgagctgcttgaacacgctccaacagtagacggtaccgattgggatatgaatcagcaatgcggggatgattgcgctggtccaacgattctcggtaaaccttgccattcggtaggatcctttcgtaactggctgtacgatgacctgccggcctgaacaagagccgcatcgctcactcaaggcacatcatgcaggactattcgtgaatatgcgaacaatcactgaacatcattggtgtgcattctatcagcgttccagctcttgtcgacgccgacagcgctactataacgccacttcgctggtgggattgccgatgattgcggtcttgatccgtgaacttattcacatcggaaatgattatgaaatcgtatcaatgtgattgataggggggggggaacgcgaaagccccatccgtgtagggcagggctttcgcgatatgtgctgatataaaacggagcctccgctcgtcgcggaggcgctgtgctgcggtgaactttgcgtgcgcaaagctattgcgcaaagcccaccgctacgttttggccttggaaagcccaccgggctttccaagcggtgttggccgcgcatgcggcccaacaccggccaaaacgtcagcccgtgttctgcaggccggcggcgacaccggagacggtgcacaggatcagatagatgaatcccgcctgctggctcttgctgagctcttccttgtccaccttcttgcgcagcgaacgcaacgcaagcacctgagtgacggacagcgcgtccacgtaaggggagcggatgcggatggcctgaccgagcacgtgacggtgctgcagcggccattcgtcgttgacgatcttgagcacccacttggtggtgagcttcatctcgtcgagcaccttcttcgacaggttctcgtcatcgccgagcgccaagtacatcttggcgatgcgctcatcggtcttggccagcgacatctcgatgttgtcgatgaacgtggagaacagcggccactcctcgtacgcctcgcgcagcgtgtcaaggtcgccgaacttctcgcaggccgaaccaaggccataccatgcggcgaggttgatgcgcgcctgagcccaggagaacacccacggaatcgtgcgcaggtcgtcgagcgacttcgcgcccaaaccacgcttggccgggcgggagccgattggcagcaggccgacctcggtaagcggcgtgacgatcgagaaccacggggcgaagtccggcgtgttcagcaggtcgaggaagcgctcatgcgaggcgttgtccagaacctcggtcatctgggcgtacttctcggtcatctccgtgttcgtcttctcgacgctcggagcggactgcagcagcgtcgcggcggcgacggattccagatggcggatggccagcaccgggttgccgtagcgggcgaaaatgacctcgccctgctcggtgagtttgaagcggcagttgacggagccctttggctgggcgagcaccgcgcggttggcggggccaccgcctcgaccgacggcgccaccacggccgtggaacagcgtcaggtcgatgtcatgcttcgcggcccaagcgacgatgcgcgattcggcggaatgcagcgccagcgtagcggtggtcgggccggcgtccttggacgaatccgagtagccgagcatgatctccatcttgttgccggtggccttcagacgagcctgcacctcgggaatcttgacgatctcttccagcacgttcacgcagttctgcaagtcctcaagctgctcgaacagcgggatgacgtcgatgaccggcacatcctccgggtgcgaaaacgccagacggttcagctcgtacacgtcgcgcacgttctgggcgctcttcgtgaacgagatgatgtagcggcgggcggccttgatgccgttgcgcttctggatggcaccgagggcgcggaaggtgtcgagcacctcgtgcgtcatcggctgcagttcgccacgctcgccgtgcaggccgtgctcgcggatgtcctccagcgcgcgggcgtgcaccacggagtgctgacggaactccatctcgaccatgtggaagccgaaggtctgcgcctgccagatcagatcctgcagcgggccatacgccgaacgcttggcgccggcttcggccagggaacgctgcacgacctgcaggtcggcgatgaaatcgtcgcagctgtggtacatgaggtcggcgtcgcgctcgatggtgtagcgcaggcgatcggccatcaccagcatgacggcgcggtgcagctccttggtggagatcagtgcggccttgtcggtcaggcgctcgctcatctccttctggtggctccacaggctcttcagctcggcgctggccggggtcgtctcggactccatggtcaggttgcggccgaccgtgcgggtggcctcctcaagggcgccgatcacatggtcgctgaacttgcgggcgacctgacggctgaccttggcggtgacgttcgggttgccgtcgcggtcggagccgatccagcttcccggatggaagaacgccgggcactgcggctgttcgagaccggccttgtcgcccagcagccagtcgttgaaacggtggtagaccttgggaatcgtggtgaacagcgtgttgtcgaagatgtcgaggatggtatcggcctcctcgaccggcgtcggcttcttcagcgcgatcggggacgtgcggaacagcgcgtcgatctcgttgtagaggcggcggacgttctccttcttgtcggagccgccgaggcgcttgttctcttccagcagctccgcgatgcggcggatcttgccttcgactgccttgcggcgcgcttcggtcggatgcgccgtgaacaccgggtggaattcgagcttctccagcaacgccttggctttggccggccccatttcggtcagcagctgatggtaggcggtggtcagttcgttcaccgggtcaacggcttcgtcgtcttccacctggttctcgcgctggtgcagcacggaaacgcggtagttctcctcactcaggttggcgaggtggaaatatgtggcgaatgcgcgggcgagcagctgggcgtcgtgcagattcatcgcatcgatggtggcgacggcctttgccagaccatcctcatcggggtgcggatccgccgtcgctccggcgaaatgctcggcgcttgccttcaccgcgtagttgcgcacggtgtcgaacgtcgccagcagctgcgggtcatattcgcccagtacgtcgcgcagaatgcgcaggcacaggctcatgtcgttgctgagcgactcaggcagctcccgctcttcggggcccttggtcccggtgccggtcgacacgatggtcgcgtcggcgggcgtgatctgttgatcggtatcggtcattcataacctcctttgtcttttgggtccggttgctcggtcagtcggtcctccgcggctcctccgcggttgtgttggccgtcagttgcgagcccacagccggttgcgccaaaagctgtgtgcccattctattgccctgaaatcgcaagttgtattacgaagtccaatttttctctgaaggattactggtaaatatgtaatcttcaccatatcttcacgctgtcggatggcccgagaatgtcgtcctgaatatcctcgtcgacgtatcgtccataatcttgtcgaaggtagtccatcatgcgaacgccggtttcggtcataccccatgagttcacggcgcggagtaagaatgactactgtaaccatcttgaaaacacgcccgagcacacccatagggcggcaaaaacaacggcatgatacggatagagaagaacatgcagcagcacatgaacggcgacgcgccccatcaggacgcggcgacggcggtgagtcatttccacacccactccgttccccttgacatggaagacattcgacgcgactgggacaagccgatctccgaggccggcctcgccgccaagaccagcgttgtcgtgcgcgtcggcgcactggacctgggtgctggaaccggaagcttccgcgtgcgcgagatgatgcaccgcatcgcgtaccccctgggcgtgcacgtgcgcgccgacgtgaacctgacggacatcgaggccacctgcaccgatgacgccaaccgcatcaccgaggtcatcgacctgcccaccaccggcgtcaacaccgagcgcatctggctgctggagcattacaccgactggttcagcgtgaacctcgggctcgattccatgtaccatcgcgcgggcgacgtgtccgaaggtgtggtgcagaaccttgagcaaagcgacatgtccgaggtctccgcgcagctggccaagaaactgcgcgccgagaagaaggcacagaaggagctcagcggcgaggcctccgacgacccggtgctcgacgccctggaggcggccgaggtcaccgtgcccgtctccatggtccgcgcggccgcggccgacatcgccgcggaaggttcgacggacgacgagctgcgctccgaatccgaggccgtcctggaagaggatcgcgaggccaagctgctgcatgaccggttgatgcagcagcgctccggaaagcatgatttcgtggagacgccggatctcgacgcggccgccgcggcggcgggtggcacaggcgcggacgcaggcgcaagcgccagcagtgcggaagaccagaatctgaacgaattcgggacatcgatgtcggcggaggcgctgctgggcgcgaaacgccggaaaacccgcgcccacaagccgctgaccggcgagtacgccgagcatttcgaccacgtgggccgttgcgcgggcgaagggcgcaagcccatcactgtgcggcaggcgcatgagcggctcgacctgatcgagagccgtaagccgctctattccccggcgttcgccggcttcgcctccgcagtcgcctgcgcatccttcgtgttcctgctcggcggcggcccctacgacatgatcggcgcgttcgtcggcgccggactgggccactggctgcgccgcaaactgttcgcccgccatctcaaccagttcttcgtgacgttcgtgtgcgtggccctggctgcgctcgcctgcacgggcactctgcgcctgatcggcctgctcgacccgatcgcgctgacgcatgacaccgcgtacatcggcgcgatgctgttcgtcatccctggcttcccgctgataacgggcggcctcgatatggcgaagatcgacttcccgtccggcatccaacgagtggcatacgtgctgtgcatcatcctgatggccacgctggcaggctggggagtggccatgatcgtgcatctgaacccgaccgggttcgagccgctggggctcaatccgtgggtgaacacggggctgcgggccgtcactgccttcctcggcgtgtggggcttctcgatcatgttcaattcgccgcagcgcatgtgcctggtcgccgccaccatcggcatgatcaccgacacgctgcgactgacgctggtcgatttcggggtgccggccgaggccggggcgttcatcggcgcgctgctggccggtctgctcgctgccggatggcgcaccgccgtgcacaacggcctgctgccgccgcatctgggctatccgcgcatatgcctgactgtgccgtccatcgtcatcatggtgcccggtctgtatatgtaccgggcgatgttctacctcggacagttcgatacgctgcacgcgctggactgggcgttccgagcgttcatggtgattatctgcctgccgataggtttggcgatggcccgcgtgatcaccgataagtcatggcggtatgacgtctgacgccttgcctgcgcggcggacggttcccgatgggattcgtgtgaggaatcctcatgcgttccttgtcgggaatcattcgccgtgcaaagaggagtacgtccaacggcctgcgagcatggtcgccgccaccggcatcgcccgcatctcctccggcgtggagacagcatacgggtcgcggtccaagagcaccaggtcggctggatctccgggctcagggcggtcgcggccgacggctgtggaagccgccagcgcggtgcgcgcatccaggcattgctccggctggaacggttcgcggtctgagctttccgtgccgaacacagcggccgatatcgccatccacgggtcgagcggcgcaaccggcgcatccgaccccatgcgcagcctgacgccggcatcgtgcagtgccttgaatgcgtaaggggttccacccggattcgcccagaaccgcgtgatgacatcgcgatcgtccatggcgtgctgtggctggatgctggcggtcagcccgagcttcgcgaatcggggaatatccgccggcttcagcatctgggcgtgctcgatggaaccgtgggcgtgtgtgctcgccgccgcgttgagcacgatggtgttcgcctcatcgccgatggcatggcacgcgatggcgaacctatggcatgtcgccccgtggaaatacgtctcgatctggtcgggtgcgtaactgagcgtgccgtaaaagtcggggaatatatcggaatacggcatcgagcagaacgccgaacgggtgttcagcgagccgtccgagatcatcttcatcgcgccgacatggcccagtccatcgctgccgggcagctcgacgcccgtcttccagccggcttcaatcgcatcctccagccgttcgggatacacgcccgcctccacgcgcaatcctcggatgccgtgggtgaatgagccatcccaatcgatgcctgtccaagcggaatcgttagcgtcgcgcgggcggggagacgccgcggagaaccggcgggtccacgtgtcgacgttttccgccatctcatagtcgcggatgccgaccacgcctttgcgggcggcatccgcctcggccttgcgaatcagttcgagcgtctcctccgccgctccgggcgcattgtcgagcttgcagtaggcgtcgaaccattcgagctcgcccacaagaccggactccctcacggtcaggcccagtcgccgcgccgccggttgccgtcaccgagatccgggagccggcgggcgtgattgccgcaatcgcgccgcccttgatcgcgatgtctacgcggcgggcgctgcccgggaaccgcgcgttggtgattatcgtcataattgcctgtacctgccatcctgcatcagatcagaaggtcatgggcgcatgtggcagaaacatcgtacatatccgttcgcacctcggttgcttggccggttacaccaatccccttcaccgtacccccctaattgtgtggcgtcaccttcggcgtcacgtttaaatcgtctttccagtgtacatgcaagtcttctgtgaacagaacccgccggtgtgtacagtcgtgcgaaagaaggcggccggcgatttcctcatgcgcggtctccgccgagccgaggtgagttatccaccgcgttgcgcacatttatccacatttgtccacattttttgaggcgcggtagacggggaactgcccggttccctacactcggctccacggcaatattcgagtcacaaaggagcggccgaccatgggcggatcaatcgcactggtgcaattgacggagttgaagcaccagcgtatgaagcagtgcgctgaattccagcagcgcagcaggtggcagccgccatacgccttgaccacggccctggagcttcaggcgattgaaataccgcgcctgccaaaaggacgcgccatgttgaacggtattacagttgtcgtcccgagtgccaatgaaaggcgcaatctcgtcggcataaacgaagtgacatggtccttccctgttgatgtcgtcatggtcgagcaatgcttgtgcgtgtctccggcctgcacatgggcgatgttcgccggatggctgaatcttgaagagctgatcgtactggcggagtcaatgatgcgccgggatgggcgtctgcgcaggacgaccattgaggagctgacggcatatctggattcggcgcgggaattcacggaagcggtctttgaagagacgggccgccggccgaatatgtttcgcggatatgccaattgccggcgtgcgttgcgtgtgattcaggaggggacggattcgtcgatggaaacgcgcacccgactcgttcccctcaaatacgggatagacgcgccctgcgtcaattacaagattggagtgaagcgtctgaaccgggccgtatatcttgacctcgcttacccggaatacaagatctgcattgagttcgacggagggcatcacgccggtcaatggctggaagatgcacgccggcggcaggcaatcgaagacgagaagtggcggtatatccaagtcaccaagcttgacctcggtgatgaatggagtgaggaagctttagccagacggatcgcggataagatccaggaggtcactggaattcccgtgcccgtcactgcgcggaagaccatccaacaggtgtgcgatgccagagcgatgagacgcaagccactgtacgagcggatagggtttgaaccattgctgccgcgagtcccgaacgccaatgccgattttcctgacgcggatgaccttgacggtatcgcgtgatcgaaggcaggggtgcggaatcgcacgattgcgctgatgcgattgcgttggagagagaagcggagggctgtagctggctgcgccttgaccggatggcgtcttctgtgacgctatctgtgtctcaaggggttgattgggcgtcctctgggcatctatctgcgtttcagggggttgccgaaacgcgatacccggagtattgccggtgaaatgccattggggtcatgcggtttgaggtgcgtttatactttggcaccaacccctcgaaacgtagatagatattcggcgcggtccaaatcaacccctcgaaacgcagatagccttatctcggcgagttcgacgggtcggggcaggggcgtgcagacggctttctgtcccgaagggcgacaccgttatgggaaggccccttcgtcgcgtgcctcggggcggagtgacgaagggggcctgatgcaatcgttgcgttcgactgccggaaaatcagtacttcatgcccatggcctcgcgcacctggtcaagggtctcctcggcgatggcgttggcgcgggcgttgccatcgtgcaggatgtcgcggatggagtccatgtccttggcgagctctgcgcggcgctcgcgatgcggggcgaggaactcgttcacggactcaatcacgtacgccttgagcgcgccggcgcccgcatcgccgatttcggcggcaatgtccttcgggtcgcggccggtcaccagtccggcggtggtcagcagcgcggacacctgcgggcgggcgatggggtcgaaggtgatcttgcgctcggaatcggtcgggctcttcttgatgagcttggcggtctccgcggcggtggcgcccagcatgatggagttgccgtacgacttgctcatcttgcgaccgtcgaggcccggtatctccggtgcgtcggaaaggatcgcggcgggctcggggaacaccgggttcttcttggcgtagcgctcgttgaagcggcgggcgatggtgcgggtgatctccacgtgcggcaggttgtccttgccgatcggcacgacattggccttgcagaagaggatgtcgcacgcctgatgcacggggtaggtgagcagcaagccggtcagcgcgtggccggaggcctccatctcggacttcacggtggggttgcggtgcagctcggcctcggtgacgagggagaggaacggcagcagcagctggttctcggccggcacggcggagtgggtgaacatcatggtcttggtcgggtcgatgccggcggccatgtagtcgagcacgaggttcagcacgttgtcttggatgtgctcagtggtgtcgcggtcggtgatgacctggtagtcggcgatgatgatgttggtgttcacgccgcggttctgcatggccacgcgctccttgatggagccgaagtagtggccgaggtgcaggcggccggtcgggcggtcaccggtgagcatcgtgaacttgcccggctcggcctcaagtttggcgagcgtggcgtccgaacgcttcttcgcggccaggaagctggcgctcatttcgttgcccgctgcggtcagttgctgctgttcttggtccgtcataagtcgccctttgcttgcttcaaaacgccgaaaatatcgcttttatcgtaaaagtccaagcagacaaccatttctctcataacaagtggtactctcttatgtgatgaattgatagttacatttacatgccagggggtcacatgggccgcggacgtcagaaagcaaaacagcagaaaatagcccggaagctcaagtacctgaccaccgataccgattacgatgagctcgccaaggagctgagcacgcaggagccgggcgaggggtcgcccgatccgtttgccgatatcgaggcttcgtattctcatgatgcgaacgccgccgtggacaatacgcagggatccgtcgctgaggatgaccttgacgagtacgccaagtgggctgccgaggctgcggcgaaggcgaccagtggcgaaatgccggccgtgaaggcacctgaatctcaggctccgaagcccaagccgatgccgcgcaagccgattcccatgcccatgccggccgcgctcaagcccaagaaggcatgattttcggatttcgtcgctgctggcccggtggtagggtcgcattgacgcgatttcgtatgtcatgatgacgattccgttgcgatatgcgatgacagcgatgctgacgcccagtacgtgcgctcgctgaccgcatcatgggcggccgctcggcagctggagccagatagacgtattcccgtcggcagagcggtttctgacgcgctatgggcggcggcgtgacgtcgatattctgctgctggacgtcgaaatgggctcgatggacggcgtggcgttggcgaaggccgtgcgcaaggcgggcggcacgatgcagatcgtgttcgtcactgggtattcggatttcatcgccgaaggatacgacgttgaagcgctcaattatctgatgaaaccggtggatgcggccaagctgttcgacgtgctcgacaaggcggtcgcgcgcatgcgccgcgattccaggtgccttgatctgcaatgcgcggaagggctgatgcgtattccgctggccgacatccgctatcttgacgtgcgccgtaattatgtgacggtgcacgccgaccgggattatacggtgaaacgcccgctgggcgagttcgaggccgagctcggcgacggattctgccgggtgggacgcgcgatgatcgtgaacctgcggcgaatccgctgcgtgggcaggtcgtccgtgcaatcgaccgacgggacgacgccgccactgcctcgtggggcgtacgagccgttgaatcgggcaatcatagaccagacaagactacgcatggccggctcacggccggcagggtgccggaaagccgtccccggctggacggggcagagcgcaaaggaggggcacgatgtggttccgtgggcgaggcaaggccgacagggccatcgcggcatatcagcgcgagctggtcgacacgcattaccgcgaggtcgagaacatgtaccgtcagatgcgcatgtggcggcatgactaccgtaatcaccttcagacgatgaaggcgttggataccccgatcaagtccggcaatgcgatggctgacgcgattctgagcagcaagatgtcgcttgcgcaggcgcctggcatcgacgtgcgcgtggacgcccatacccatattccgatcaagcagcgcatttcggaactcgatttgtgctgcgtcctcggcaacctgttcgacaacgcgatcgaggccaacgacgggttacctgaagccgatcgcatgattcgcgtgtatatggacatgaaggacacgcagctgtacatctcgttcaccaacgcttcctcgggcggcaagcagcgcaaggtcggtgggcgcttccgcaccatcaaatccgacgaggggcacggtttcgggttggtccacatcgaccagatcatcgaggctgcgggcggctacctgagtcgcaactccgaggacggcgcctccaccacggagattctgctgccgcagtcctgatgacggcggtgcgggctcatgagagcggattgtcgatgtgcgtgctgcccgccggcgagggaggaagctggggccaaagccctctccttggactcattaccggtgaatccgtgcaagatagcgtccgcgcccggacccgaacgccgcagccgttggcatgcgacggtatgctggaatggtgaacagcatggcgtgcagcggcgtattcgagccgcgtaatattctagtgaccggcggatgcggcttcattggcgcgaacttcgtgcgatacgtggcgcggaaccatccacacgcgcacatcaccgtgctcgacaagctgacgtacgccggcaatccggagaacatcgccggcctgccgccgtcgcaggtcgatcttgtcgtaggggacatctgcgacgtcgcgctattggagcgtatcgtgcccggtcacgacgccattgtccacttcgctgcggaatcgcacaacgacaattccatcgccaatcccgaaccgttcatccgcacgaacgtggaaggcacgatgcggctgttggaggccgcccggcaacacgacgtgcgcttccaccacatcagcactgacgaggtatacggcgatctggcgttggacgatccggcgcgtttcacggaagacacgccgtaccgtccctcaagcccgtacagcgcctcgaaggcgtcgtccgaccatctggtgcgcgcatgggtgcgcacatacggtctgcgcgccaccatctccaactgctccaacaactacggcccgtaccagcatgtggaaaagttcattccacggcagatcacctccatcatggagggcgcgcggccgaaactgtacggcaccggcgagaacgtgcgcgactggatacatacggaagaccactcccgcgcagtgtgggcgatcctcacccgcgggcgcatcggcgaaacgtatctgatcggagcggacggcgagatgagcaacatcaccgtgctgtgcatgatcctgcagctgatgggccagccggaagatgcgttcgactgggtgcgcgacaggcccgggcacgacagacgatacgcgatcgacgcatccaaactgcgcaccgaactgggctggtcgccgatgcacaccgacttcgccagcggattgcgcaacgtcatcgactggtatgcggaacaccgcgactggtgggcgccggccaaggaagccaccgaggcccgctaccgcgcgcaggggcagtgaagcgaccgcctctacaggcggcctttccgcggcaggtcaacgttgcgcagcagccgttgcaagggcttgagcaccacgatgtcggcgaccaccgcgaacgccaacgccgcgagcagcgtggcggcgaacatcagcacgctgatgcccgcgtacgaccatccgtccgtgggcgcgggaatccgcgggccgatcagaaccttggacagcggcaatgcaccagatacatcgtgtaggagtatcccgccagccaggtgggtagcagggtgcggttagagttggcgattagggcgttcgcgccgaattatttgggtttgatgactttattcgagagaggctgacgaatggtttcgccacatcatcttttgaagattgcgactgcgctgtctgcggttgcgttgacggcttccgtcgcggttacgccggcttacgcattgcaggatatcgcgattgaggatgctgtcgcgcagagcggtcccgttactgcagataatggcgttgttatgcagtctgacgatcagccggatgatcagacaggcgaccagcaatcgcaagacggcatgcctgacaatccgaatgcgaaacttccagataccgtcagtgacgagatttccgacgatgcaactgtggtttcggaagacctggccgtcacccctgaaggtgaggtcaagaatattgaaaccggcgaaaccgtgaccgatgcgacactggtcggtacgcaggatcagcagccggatccgctcgccaaaaccaatggcgaatccttcattccggtgagtgcggaagatgtcaaaaatgctgtagccgacgcgaacgtacagctctccaaattcgaaggcaatgaatacggcgcgcactggggcacttacaacaatacgaaagccttcttcgactaccagaacaacctgttcgtgcagcaagccaaaggcgtgatcgacgtttccgaatggtaaggcgacatcgactgggccaaagcgaaagccgacggcgtggaaggcgtgatcatccgcctcggctacggttggggcaacaatgccgacaagaaagcacaacgtaacatttccgaatgcaagcgatttggcatcccgttcggcatctactggtattcctacgcggacactccgtcgattgccaaagaagaaggtgccggcgtggtcgccaaactcaagcgattcggtgtgcgcgcgagcgacttggcgtaccccgtgtactacgacctggaaaagtggacgtggaaggggcgtcagccgcccaccgatccgaacgtgtacaacgatatcgtcaacaattggtacggcgcgctgcagtccgccggatacaagaacctgggcgtctactcgtacaccagctacctgcaaggcccgctgaaacatgccgacatctacgccaaaaccacgtgggtggcgcagtacggcgctcgcatgggattcgactcgttcccgaccaacagtcgcggatggcaatacaccagttccggcaaagtgggcggcatcaggggcaatgtggatatgaatgcgtttgggaataaggagtatgtgaatggcgggagtagtaatgatttacaagcggccattgatgtacgcagaatgactgcagttaccattccgaatggcaattattacatcaatgttcgttccaaagtcgcgtccagtgttgatattcctggtggaagtgccgcagattccaccgccattcagttgtattccggcaacagttccaaggctcagcagttcacttttactaggcagtctgatgggagctatgagatcgtcaatgtggattccggcaaggctttggacgtgcgtaatggtgttgctgagaataacgctgtagtgcaacagtattctcgaaataattcccaggctcagcgatggtttattcgtgattccggagcgggatattatttgcagtccgctctcggtaattgggttctggatttgagtggcggaaatactgcgaatggtgctgcgattcggctgtatgcgccaaatggcactgcttcacagctgtttgttgtttcgtcaagcgatgccagtatagctactggagtatcgatgactatcacttcggttgcgaataaaaaacttgtcacggatgtgacgggtgcgtcgacggcgaacggggcgcgagttcagctttattcaagtaataatacgaacgcccagaaatatcgatttgaatcaatcggcaatggaacttataagattatcaatgctaattcgggcaaggtgctggatgtgtctggcggatccactgctaatggggcggcattgcagcaatatacgagtaacaataccgttgctcagcagtggacggtgcggaattatggcagtggcaggattgcgctggtgtcggtgaacgccaacaaagctgtcgatattccagatggcaatgccgtgcagcaggctcagctgcagctttattcgccgaatggcactgttgctcagcagtggttggtcgcaaaggcaccgttgacgttgcgcgaacgtttgaacgaaaccgcagccaagcataggcaagatctgccggatggcacctacacgttcggatcgaagcttagtacgtccatgaagatggatgtaagcggcgcttcccgttcaaattatggaaacgtgcagatctgggcgggtaatggaaccaatgctcagaagtggaaagtgacgcatgattccaacggatacgtgaccttgaccagtgtgaactccggcaaagtgttggatgtgaatggcggcgtatctgccaacggaaccaacgtgcaacagtacgattccaatggaacatacgctcagaagtggatagcagtcaaaaactccgatggctcatacacgttccagtcggcgctcgcggaaaacaaagttcttgatgtttcgggtgcttctacctcgaatggtgccaatgtgcaactgtataccgcaaatggcacgaatgctcaaaagtgggtgaaatagcagacagattaaccaataaaatatggctgaggacaagtatctttttgctctcagccatatttggaatctgtgctatttctggcgccgcatcatggcgaattgattggcgtcaatgatgaatgctttgcggtcgtttttggccatgacatcgaggatgatgccggtgatgaacaatagcagtccggcaatgacgagcatgacagcgccgataagcgtggggaatcgcgccaccatgccagtgtgccagaaatccacggtcacgctgccgcacagcacgatgccgatgataccgaggatgacgccaagtccgccgaagaacggcagcggcttatactcgcgaatcatgcggaagatggtgctcatcaccttgatgccgtcgcccacggtgtcgagcttgctgacggaaccctcggggcggtcgcggtactgaatcggcatctcaaacaggcgcagattgttgttcaacgagtggatggtcatctcggtctcaacctcgaagcctcgcgaaagcaccggataggttttgacgaacgtgaacgagaaggcacggtagccggtcatgatgtcggtgacgttcgcatggaacaggccattgatggaaccacgtaccaaacggttaccgaagttgtggaatggtcgtttgttctcttggaagtaggtggagctcagtcggtcgccaatcaccatatcgtagccttcgagcaccttatccaccatggcaggcgccgcgtctgccggataggtgtcagcgccatctgccatgacgtacacgtcggcgtcgatgtcttcgaacatggcgcgaatcacgttgcccttgccctgtcgcggctccttgcggacgattgctccctctgacgcagcgatatcggcggtgcgatcagtggaattattgtcgtaaacgtagatgtctgcttgtggcaaagacgctttgaaatcgcgaacaaccttgccgatagtcacttcctcgttatagcaaggaagcagcacggcgacggtgggagattggttttctggcacaagcatcactataccctattacagtggattactgtggtttttaggctggcaggcgtctctgatgattcggttgagaggcgaatgatgtgaatcggtttgtgtcgtcaccgttcgacttgcgtgtgaggccgtattctcgactccgattgaacccattgtgtatttggtcactgacaagtatttcgtcgtattacttgtggaaagtatgaatgatgggtcgccggaacgcgcatagtagtggacgcttcgtatcattgagcacacgaagccggaatgagcgaatgtgattttcggtcggtgcacgcgaggagcgtgtttggaaagccggtagcagagaattggaagacgtttggaagttcaaaatgagaaggccttgggcgcgcaggccgcaagcgcgaaaaacccaaatgtgaaagcggtgcccgcccaatgggtgcgtttggcattgacattgctggtcgccgccatcatcagctgtggttgtgtcaaagcatatccttggttctccgcgaaggtgttcaaccttacgcttgccggtgctgatctgcatatcaaactgttgcggctcgccatactgttccctatctggacattggtgtgctcatggttctcgtttggccttcccatggtaggcgactggctgcaccgcaaccggttccgtctgggtgcggccatcattctggccgcggtggtgttgaacgttagcggctcctcgatggccgtgtggaacatctggcttggccgaaatggtacccaggatctcgtgttcggcacaccacgccccatccgcaccgacgaatatgtggtcggcaccccgctggccttctcgcaggcatacaacaactacggctacttcaacggactattcggtgataagccggcggacatgttcatcatcaaggacgctccggcatggttccccaccgaagtgttccgcccattccactgggggtacctgctgttgggtagctccgcgggattggccttctactggtcggcacgactggtcgtcctgttcctctccgcttatcagttctttctgtgcgtcggtggcgacaagaagcccgtctcccgtcccatggcggttttcggcgcttcgctcatcaccttcgcgccactcacgcaatggtggttcgcggtcaacggtttgccggaaatgctgatcgcggtattcgtatccatctgctgcttcgaccacatgctccaacggcaggagacgtgggtgcggctgctatgcggtgcggtaatcatgcagtgcgctggcatgttcatcctcacgctgtacccggcatggcaaattccgatgggttacattcttctgggcctcatcatcgccatggtgatcaggcactgggggaagattcgcttcaagcccgtccaaatcgtcggactggttgtgataggactcgttttcacaacattgctgggtttggccctgctgaaatccgctgacacgatccgtgcgatgatgagcaccgcctacccggggtcgcgtatgtcgaagggcggcggccaatccccgctgctgatgttctcttccttggccacgctttgcctgccattcaaggatttctacgagagcgcaatgctcactggcaacaatgtggaagttgccgcattcatcgatctgtgccctctgggcatgctgttcgcggtcatgaacatgattaagcgcaagaaagccaatttcctcgattgctatctcatcgcgttccttgtgtttatgtccgtatttgccgttgtcggattccctgcttggttgtcaaagctgacgttcatgtcatcggtgaccagcagcaggaccacggtcgccattggcgtatgcaacatcatcctgctaatcaggtgtgctcgggaatggtgcgccaaccattccgtgaaggccaaggctgtggtcgccgtggtgtacacggtatgcgccgcggtgatcgcatacatggtcttcagtccgtatctggatgtcacgatgaccatatcgtgcgcggcagccgggttcgtccttgcggcggctgtggtgtcgtgcgatttgaaggtcggtaagatcgtcgcaacccttgcaacattggttatggccttctccggttttgcaatcaatccggtgcagtactcctccgcgccaatcaccgatcaaccggtggtccagcaggtgcgcatactgcaggagcataagcctggagtatgggtcgcggaaggcggtaactgcgcacgtctggcgaatctgctggtggcgaacggcgtgaagacgttcaacgccttggcggttaccccggacctgcaaggcatgaaacgcctcgatccggacggcacatggcagcgcatctacaacagatacgcgttcatcagcatcaacatcgtcgataagccggtggagaaaccattcaagctctccgccaacgatgcgtatacgattaccgtgactcctgaacagctggaacggttgggagtgacctacgtactttcaacgaacgatctgaacaagcgcaggttcgacgggtatcgtttcgtgaagatcggcgagacggtcagcggggagacgccgtacgaagtgcagcggattaactaatcccaagtcgagttctcgattgttgcaggcagggagcggggagaacggctccgttcgccccgccgggacttggcgtacatacaacggcaaggctaagataaagttctatgtctgaagaacttttcactcccaagaacatcatcgtgaccggtggctgcggtttcatcggatcgaatttcgtgcattacgtggtcgacaaccatccggacgtgcacgtgaccgtgttggacgctttgacctacgcgggcaacatcgcgaacatcgcgggcctgccggaggaccgcgtcgagttcgtgcacggcaacatctgcgacgcggagctgctcgacaggatcgtgccgggccacgacgcgatcgtgcattatgcggccgagtcgcacaacgacaacagcatcgcgaaccccgagccgttcctcaagacgaacgtggaaggcacgttccgcctgctggaggccgtgcgcaagtacggcgtccgctaccatcacgtgagcacggacgaggtgtacggcgacctggcgctggacgatccggcgaagttcaccgagtccaccccgtaccatccgtccagcccgtactcgagcacgaaggcggcatcggacatgctggtgcgcgcgtggacgcgcacctacggtttgaggaccacgatctccaactgttcgaacaactacggtccgtaccagcatgtggagaagttcattccccgccagatcaccaacattctcgagggcatccgtccgaagctgtacggcaagggcgagaacgtgcgcgactggatccacaccgaggaccactccagcggcgtgtggaccatcctgacccggggccgtatcggcgagacctacctgatcggcgcgaacggcgagaggaacaacatcaccgtgctgcgcatgatcctgaagatgatgggccaggacgaggacgcgttcgactgggtcaaggaccgccccggccacgaccgccgctacgccatcgactccaccaagctgcagaccgagctcggctggaggcccacgcacaccgacttcgagtccggactgagggccaccatcgagtggtacaccgagaaccgcgcctggtgggagcccgcgaaggccgccaccgaggccaggtacaagcagcagggccagtgagctgtagatgagtgatgaggctgagctggaagcattgcttcgccagttgattgtggactgggagaacgaagtcgttgaattcaaagcggctggagaagattattcgactggcacaattgggaaatatttttctgctttatccaacgaagctaatcttagaggcaatgcttcggcttggctggtgttcggtgtagacaacaagacgcacacaatagttgggacgaagtacggcaaagagccggaacgtttgtcgcaactgaagatgcagattactcgtgataccgagccgcgctcatcttttaaagacattcatgagttgaatcttcccgaaggaagagtgctcatgtttgagattccacctgctccaaccggacttcctgtatcatggcagggatattggcacgggagaagtggcgagagtcttgttgccctgaccgcagacaagatggatcgtatccgaagcgaaactgacattaatgattggactgcagaaatagttcaagatgcttcgctaagcgatttggacgaggaagctatgcgtcacgcccgctcggcttttgcaaaggctcatgcgaaccgtattagcgaagaagaaatcgcttgttggaccgatcaggagtttcttaaccgtgctcgtgtaaccaagaacggtcaattgactcgtgccgcattactcttgctgggtaaacctgaagcagttgataaactgccagccggcatgtttgaaatgacatggaagctggtgggacaggagaacgcttatgaacattttggtttgccatttctgctgagcacaacgcggctgtatcgacgaatcaggaatattcagttacggttgcttcctccgggacagttaatgccgcaggaagtgtcgaaatatgacgagcaatccgttatggaagctctgcataattgtattgcgcatcaagattattgcagaggcgcgcggattctggtaacagaatatccggaccgtctggttttcgataacagtggttccttctttgaaggacatccagatgactatatcttgggagataagtctcctgatcgttaccgtaacccatttttggtcagggccatgggtgagctatacatgattgatcgtatgggatacgggattaagaggatgaacgaagtccaagccggcaggtatcttccgctccccgattatgacctgagtgaagtgagcaaggttcgtttgaccatgtatggcggagtggttgaccaggagtacactcgcttgcttctgagcaacactggtcttccgttgcctgatgtgcttgcattggatagagtccagaaaggaatggccattccagaagatgttgtcgcgcgtttacgaaagaagaagctgattactggaagaaaaccgcatcttcaagttgcgccggtaattgctgcagcttcggacactaaggccgaatatgtgaaagcacataatcaggacgatatgttttaccagaggctaattattagctatcttgaggaatttggttcggcctctcggcaggatattaataagttgttgtttacgaagctgggcgatatgctcacagatgacgaaaaaaacaaaaaagtcgggaatcttctgacttctttgaggagagaggggcgtattttcaacgcgggatcgcgaaggtacccagagtgggaactgaagcaaggcttttctgcagaataggagatttcagaataagaaatggacttctgcagaataagactgttgggaaacagccgttttctattctgctgactactatttgagcagaataacaacatcaaggaatgggactcatggattttgagaaggaactgaaggtcgagaggacgaacatccccggcctgatcgtgttcgacctgccggtgcacggcgacaaccgcggctggttcaaggagaactggcagcgcgcgaagatgaccgcgctgggcctgcccgatttcgggccggtgcagaacaacatctcgttcaacgcgaagaagggcgtgacccgcggtatccacgccgagccgtgggacaagtacatcagcatcgcgaccggcgcggtgttcggcgcgtgggtcgacctgcgcccgggcgagagcttcggccaggtgtacaccacccgcctcgacccgtccaaggcgatctacgtgccgcgcggcgtgggcaacagcttccaggcgctcgaagacggcaccgcgtacacgtacctcgtcaacgcgcactggagcctcgagcagaagaagacctacaccttcgtgaacctcgcggacccggagctggacatccagtggccgattccgctggaggagtccgagcgcagcgaggccgacctgcaccacccgatgctcagggacgccaggcccatggccccgcgccgcacgatggtcaccggctgcaacggccagctcggccacgccatccgcgactacgtggaggagcacggcctggagggcttcgagttcaacgacatcgacacgttcgacttctccgacccggcccagtacgaccggttcgactggagcctgtacggcacgatcatcaacgccggagcgtacaccgcggtcgacagggcggagaccccggagggacgccccgtggcgtggaaggccaacgcgcagggcccggccctgctcgccagggtcgcccacgagcacaacatcaccctggtgcacgtgagctcggactacgtgttcgacggcaccgccgaggagcatgacgaggaggaggcgttcgcgccgctcggcgtgtacgggcagaccaaggccgcgggcgacatcgccgtggcgaacgcgccgcgccattacatcctgcgttccagctgggtgatcggcgagggacgcaacttcgtcaagaccatgatggccctgtccgaccgcgtcgcggacgcgcgggacggcctggacgaggtcaccgtggtggacgaccagtacggccgcctgaccttcacccgcgacatggccgaggcgatcttccacctgctcgactccggggcgccgttcggcacgtacgacctgaccggttcgggcgcggtgaggagctgggcggacatcgcccgcaaggtgttcgaccaggccaacggcaacggcgacagggtgcgcccgatctcgaccgcggagtacttcgcgaacgcgaaggccccggtcagcccgcgtccgacgcattccgccctgtccctcgccaagatcgagaacgccgggtaccacgcgccggattgggaggaaaccctcaagacatacgtcgccaaggaacttggcaagtaaggcatgagaagtcgagaaggccaagatttctcgacgaatccatgaataacgagatgctccggaatccatcccggagcatctcgtttatgtatggtctgtgtggataccccctatggaggtgtgccaacgtccatatgcaggcattagggtgtgtttacgctagttgggttttggctgtgttttttcaggtaggtggcgatgaggatcagccggaggtcggcgaggaaggtctcgtcgggcctgtctggcgggtggcggccttgcggtggtgcttcatgcggttgaagacgcgttcgaccatgttacgccccttgtgcgcctccctgtcgcaatcccatggggccgtacggttcctcctgggcggcacgcccggcgtcaggccgaacgactcggccggcggccgggtgggatccccctcgtgcgcgcggtccatgggcgggcgcgcgcccatgaacgcgccgggcgcggccatctgatatgaactgttttttgttccgtgttttccctggctcgatgggagatgatggggccatggcgaagggcgcgggatgcacgccggagttcagggcgaaggccgttgggctgttgacggagtcgcgcggctcgtgttcgtcggagaccagggcggtcgatcaggtcgccggggatccgggggtcgcgccggagacgctgcgccgttggagcgacaagacgggcgccgcggtcgcggcggggaccaggcagtcggccggggatgcgatggcggagttgaggggttcgcgggccgaggccgcgcgattggggcgcgtgaacgggatattgacggcggcgtcggcttttttcgcggccaggctcggcccggcacggcgttgacggtcgcttgcgtcgacgggttcagggaccgtttcggggtcgggccagccggcggggcgccggccggcccgccgggctgcgggttcgtcacgccatgcggctgacgggcccggatccggacacgcggcagccgcatggccgccgggcgcgaggcgccggcccgcggcatcctcgaggcccatgccggttccttcatggccgtgtacgggtgccgcaagacgcgcgcccggtcgtcggcgcagggccgggatccggccgggatcgaccgcggctgggtgatggacatcatgcgggaaccgggagtccgcggcgtgcgccgcggcgggacgtccgtcaccgccagaccggcgaaggggcgcgggcggcgggcccggcctcgtgggacgcgggttcgaggcggggcgcccggaccggctgcacgtggccggcatcgcctgcgtgcgcatggccaacggacgcttcggctgcacggcgcccggccgccgacgtgctcgcccgcgggtgtatgtgatcaaataaaagtgttcggcgtgaggtggtgacgttttcttggactcgttgagtcaaggagggcgttgtcatgacgtatagcaggcagcagtgggatcgggcggtgggcttgtatatcagatacgagtgttgcgccgcggatgcgatccatgagcttgggtatcccagcaaggaagccctgcggatgtggtaccgggagcggctggaggaggagcgcgccggcgtgccttccagacgtggggaacggcagcggcgttacagcgaggagcagaagtgcgcggcggtggaccattacctcgagtgcggcagacggctcagccgcaccatgcggatgctcggctatccggaaagcaaggaactgctcatggcgtggatcgacgagctggcgcccggccggcgcaggctgagacacgggccggtgcccgaggagttgaagcggaaggcggtggtggcggtcgcgtccggaaggttgaaatcgcatgaggcggccgccgaactgggcgtgcaggccgcggtcgtgcgagaatggaaacgacagatgctcgccggatccaaggagacgcacgtggcgagagaacgcagggaaagacccggggacggaggcggcgcacggcccgtggttccggatgcgccggcggtggccgccggttcgcgggatgcggccggtctggcggacgcgttggcgtcgatggagaagcggctggcgcggatgcaggcccgtctggacgagctggacgccgacgtcgagcggcagcggcgggagaagagggagctcgacgtcgagatcgcgatccgccggggcgcgttggagctgttgggaaaagagccgggcgcagacccggaaaacctgaccaaccgggagaagacgattctcgtcaagcaaatcagtgaggctcagagcgtgagcgtgaaaagcctgctgcccgtggtcgggctcgcgcacagcacctaccattaccggctcaacgccatgaggaggccggaccgggatgcgtggctgcttcccttggtcgaggggcgttcgagaacagcgagaagcgctacggctacaagcgcgtgcacctggaattgcagggcatggggataacggtgtcggccaaacgcgtcatgaaactcatgaccaagcacggcatggtgccgttgttcaagagcgcgaagcgctacagctcgtacaagggcgagctcactagggctcctgagaatctggtcaaccgcgacttccacgccgacgggccgaacatgctgcgggtgacggacctgaccgagttcagcatcccggcgggcaaggcgtacctgtcgcccctgatcgactgctacgacgggcttcccgtcgcctggacgatcggcacgagccccaacgccgagctggccgacggcatgctttcggacgcgtgctccacgctcggcgagggcgacagaccggtcatccattccgatcgcggctgtcactataggtggccggaatggatccgcatctgcgaggagcacaagctgacgcgttcgatgagcgcgaagggctgcagcccggacaacgccgccgctgaggggttcttcggcaggctcaagcaggagttcttccacaagcgcagcttcgccggggtctcgatggacgagttcatcggcatgctcgacgactacatggtctggtaccgcggcaaacgcatcaagaccgagtttggcatgagcatcatgggccggcgccgcgagctcggactcgtggcataatcaaaaagcaaggataaagaagtccaacaaaacggcacccccccatgcaccgctggtaccccgcccgcgggagcatggagcgcaccgtggagaccaggctcgcgcaacggtcgcccaccaccagcctgacgcccctgaggccgcgctcgatcatgcctctgacgaactgctcccagctggcggaatcctccttcatgccctcggccactccgatgacctcgcggtggccttcggagtccaccccgacggcgacgagcacgctcacgttctccaccgagccgccccacgagcgcctgtgccacacgccgtccatgaacacgtaggggtattcgcgttccaacggcctcgtgcgccacgagtcgatgtcggcgtacaccctcttgagtttgtcggagagggtctgcgagggcatcctctcgccccacagcagctggctgatgtcgtcgacctggcgggtggagacgcccgccaggtacatgtcgatcagggcctcctcgacgctttccccgcgccggcggtagcgttcgaccaccgccgattcgaacagggcgcccttcagtttgggcaccttcagctcgagcgtgccggccttggcggtgatcctgcgttcgtaatggtcggcgcggtacgccttccagccgccggaacgctcgtatctggacgccccggcgatctcgtcggcctccgcgtcgagcatcgcgttgagtatctcggtgaccttctgcgtgacgagccggtcgagcctggtctcgagcatgtgctggtcgatctgtatgatgttctcgggcatggttccgcctcctggtttccaatctcggtttttagttttggcgaatgaaaaaacgtacacaggacgcggggccatgcctttcacgtcaggcctgaaaacccaaagtgcgcaagaactcggacgttgtcctgctgggtggcgtgttgctgctgacccgtaaacgcattaaccggagtctggaaagcttgaacagaaacgaatccggattcgcccagtgaatgcaatgaaaccgcgcagatttcactgcgcggttttcatataggtggcgcggctattaagctggaaccgcttacgaagcttcgtgaaggtatcggagaaagaaagcaggtcgtgttatgaagggcatcattcttgccggtggctcgggaacccgtctttacccgctcaccacggtgacatcgaagcagctgcttcccgtgtacgacaagccgatgatctactatccgctgagcgtgctgatgatggccgggatccgcgacatcctgatcatcagcacgccgcacgatctgccgaacttcgagcgtctgctgggcgacggcagccagtacggcgtgagcttctcctacaaggtgcagccgagccccgacggcttggcccaggcgttcctgctgggcgaggagttcatcgacggcgagccgtgcgctctggtgctgggcgacaacatcttctacggcaatggcttgggccgcacgctgcgcaaggcggctgcggccgagcatggtgccacggtgttcggctactacgtggacgacccggaacgctacggcgtggtcgagttcgacgagaacaagaaggccatctccatcgtggagaagccggagcatcccgcgtccaactacgcggtgaccggcctgtacttctacgacgagcgcgtggtcgagttcgccaagcggatcaaaccgagcgctcgcggcgaactggagatcacggacctcaacaggatgtatctggaggacggttcgctgaacgtgcagacgctcggccgcggctacgcctggctcgacaccggcacgatggactccctgttcgaggcgggcgagttcgtgcgtaccgtgcagcgggcgcaggggctgccgatcgcggtggccgaggagatcgcgttcgagaatggctggatcgaccgtgagcagctgatgaaggctgccgagaagtacggcaagagcccgtacggcaagcatcttaaggatgttgccgacaacaaaatcatcgtcaagtcgaagcacgactgaaccgttgaatggtttgatacttctatagggattggttaattgaaagtcaacgaactttttacaaggaaaaattggctgttacttaaggcgatggtcagtacggatttcaagctgcgatatcagcagtctattttgggttacctgtggtctgtgctgaagccgcttatgctgttcgccataatgtatctggtttttgtgcggttccttcgcttcggcgctgatgttccgcatttcgcagttgctcttctgctgggtagcgttatgtggaatttcctcgcggaagccacgaacggcggtatgacttcagttgtgggtcatggtgatctgcttagaaagattcatttccccaagatcacggttaccattgcctcgattatgagtgcgctgatcaattttgggatcaacctcatcgtgatgatttttttcatccttatcaatggtgtgcatatttcgtttaaagcggtcttgattatccctatttttgcggagcttctgctcattgcatcaggtcttgcatttttcctgggcgcattgttcgtgaacttccgtgatttgagccctatttgggaagtcgttctgcaagctggcttctacgctacgcccatcatttaccctatttctttggtggccaccaatattggtcctcaagcagctcgtttcattctgcttaatcctatggcacagataattcaggacgcccggtatgtgcttattgcgcccgagaatcagacggtatggcaatcgttcagtacgtcattggtcggtttgattccggtcgctctgtccgttgtcatttttataggtggactggtgtttttcgagtctcgttctaagttgttcgcggagctggtgtaatgaaggaagatatgcagcaaacttcggatattgcgctcaaggttacgaacgtctctaaaagcttcaagcttcctacggagaaatcgagcagcttgaagaactctttgttcaatcttattcgtggtgttcacgggtatacgattcaggaagttctgaaggacatctcctttgaagtgcacaagggcgatttctttggcattgtcgggcagaatggttctggaaaatcgacgttgctgaaaattatttcgcaaatctatacgccgaataccggtagcgttcaggttgaaggcaagcttgtccccttcattgagcttggcgttggtttcaaccctgagctgactggcagagagaatgtgtatctgaatggcgcaatgctgggcttctccaaagacgaaattgacgccatgtatgacgatatcgtcgattttgccgagctgggcgatttcatggagcagaagctcaagaactactccagtggtatgcaggtgaggcttgccttttccgtcgcgattaagtctcagggagacattcttgttcttgatgaggttcttgccgttggcgatgaggctttccagaagaagtgtcaggactttttctttgacgcgaagcgtgagaagaagacaattattcttgtcactcattccatgaatgatgttcgtaagtattgcaataaggcaatgctgattgaaaatgggcatattaccaagttcggtaagcctgatgaagtggccaatgcgtattcgaacatcttcctacgcaggcaacaggctgaggttgctgctgaaaataatgagaagaagttgagcactagcgctgcgtgtgagttgaaggacattaaggttgtcgtttccgacgaggaacgtcagctactcgatatcaacgaggacttcgttgtcgaagcaacacttgaatgcaagcgtgatttgcagggaggcgttttcgcgatcaatctcatagatcaggagggacgcgtttccgttgccgcttcaacacgttcctgcaagggtgagggtatcttcgcaaagggaactcatcgcattcgcttcaacataggaaatacgttgccgtatggcagtttccatatcaatattgcggttgcagaaggatatgatcttgtcctgaggcaggaaaacgtatacaacttcggcattaaaaaggataaggaatataaccaagtattgatgcatccccatattgatgtgtccgttctttgactatattcggtggggcattagacttaaatcatgcgtgatggatcacgagtcttgataactcagagtgctttttccggcattggaggcagtgaggtgcaagcttttgagcttgcacaatacctgcgaaagcagggttgccaagtcacattgttcgcttggatgtgtagctctccaatgtcggatattctgcaggagaatgggttccgtgtcctcactcccgagtcggaggaatcgtctgcgctctcgctgagcgatttcgatatcatatgggttcagcatgagacgttacctgtgcagttgctgaaggaattcgtggataatacggcgaagtccgaccctcttatgattttctcacacttgtcgccgtaccgggaagtgtacattgagcatccgtatactttcgatcttgaagctaagctggctgatgtcatcgtctttaatgctccgaatacacgtgatgcgcagaaatcggagtttcgttcctacgagcggatgatgctttatccgaatcctgcgccgcttgattttgtcgcatcaaagcatatgcaatcaagcgagatgcataagatactagtggtctccaaccatccgccgaaggaattacaggaggcgatgagccttctttccgctaggggatatcaagtggacatgctcatcgacgcgataggcagcgagaagccggccatcacctctgcggagttgttggatcactatgattgtgtgatttcgataggcaagacggtgcaatactgccttgtacagggcatacctgtgttcttgtacgatcgttttggcggtccgggatacttgaacgagagcaactatgaacttgccgagtattacaatttctcggggcgttccaagccggacggctattctcttcatgaagccatgaggaatgctgtatctaatagacggacgccggaagaattggtgtcggacattgaggatggctattcagcggctgtggagtttcaaacctctcatagaaacgattttgttgcttgctactccatcagcaacgcttttgaggctgtctatgagaaaggcattgctgaaaagcataggaaaacgattagcgaccggatatacggagaatatctcgtagaatctcagaaaatgattggcgaatatgtagctgcgcatcgtagacttgccaatcccaatgccgccttctacgagcagacggtacagtctttcgctggtgaaggatatgtttttgctgcaagcgatgtactggagcaagaacaacggttgaagaagaacaactctgttgagatacatgtgccacatggcaagaggacggctcgtgtggatttcggagagtctccctgcgtcatcactgatttgaaggtcaatgggattgaacgccattgttggaataacgcttctttggagatgaacggaacgtacttcttcctggatccggacccgcaaatcgttattgatttgggggattccgtgaacactcggaagagtgacacttcgctgtttgtttccgcgaacgtgtaccctctgagtggaatacctcgcgatgtggaagagcatcgcatagcggacataaatgatttgaccgagaacctgaagaagattcaaggcagtcgttggtggaagctgcatgagaagatgaagcctgttatatcctttgcgcgaaggatgggacagattgtgaaaaggtttgtacgctagtatgttgtgcacagtgaatggaatgagtaaatgactcttgtagacaattcgacggccaagcggctgggcatactctgtttctacgataagaacggtcgtgcggcgaagttcctcgatggcttccttgaggatctgatgcggaacctgaccgatctcgtcgtcatcgtgaatggcaagattgatgatgaggcccgcaagatgttcggcaaatacacggacatcatcatggttcgtgagaacacggggcttgatgtcgccgcgtacaagcaggcgctgctgaccatcggctgggagaagctggaaacctacgatgaagtgctgtgcctgaacgacaccatcatgggccctgtttacccgttcaaggagatgttcgaaaccatgtcccgcaaggatgtggatttctggggcatcacggcgtacgcgggcgaaaccgtgaacgatgagaagatccccacgcatctgcaggcctactggcatgcataccgccgcagcttggtctcctcgcaggcgttccacgagtactgggagaacatgcccctgtggaaggactacgcggaagtcacacgcaagcatgagatgaccttcaccaagcatttcgcccagcttggcttcaaatgggcgtcctacatcgattggcgcaagtacaagggctactcgtcttacccgctgctgtacatgccgatgcaaatgctgcgcgacgaccgttgcccggtgttcaagcgtcgttccttcttcgttgactacagtgcctacttcgatcagaccgcaggccagccagcgctggatctgtacgatttcctgaaggacgagacagattacgacgtcgacctgatctgggacgcgattctgccgaactacaatatcgacgacattcgcaaagccctgcacctcgactatgtgctgccgaccgtgacccgcaatccgagaaccggagccgacgtgcgttccgcgttcatctaccacatctacttccttgacctgctgggtgacacctgccgttacatcagcgctctgccggaagagaccgacctgtacatcacgaccaccgaagacaagatcgacgcgatccgcgattatatggcctcccacggcgtgaaccatccggtcacgttcatctccgtggtgaaccgtggccgtgacgtgtccgcgctgctggtcgcggcatgcgatgtcgtgctgagtggcaaatacgatgtcatcggtttcgcgcacgacaagaagtcgagccagaatcaggagaacggccatcacggtaccgaaagtcaaggcttcgcgtacaagctgatggagaacacgcttgccagccgcgactatgtggagaacattctcacgctgttctccaatgaaccgcgtctgggtcaggtcgccccgccgccgcccttccatgccctgtactttgcgcacaccctgccgcatgactggggcgcgaacttcgagatcacgaaggaactgctggaagatcgcttcgatatccatgtgccgctgagcccgggtaagccttcggcatccgccatcggctcctgctattggttccgtgtggaagcattgaagccgttatttgaatacggatggaaatacgaggactttctgcctgaaggtgagatgggcgaagatggtaccgtgtcccacgccatcgaacgcgccaacggctacatctgccagtcgcaggggtactatcccgcatgggtcatgtcggatcgatatgcacgtatcgaggttgattcgctggtttattccactgccatgctgatgggagcaagttctcgtgcgcatgagggcgaatcgttgcagacaaatatgcacggtttatataaggcgacaaatccaatgaggatcttcccggcaatgaggcgtcgcctccataagggtctgcagtttttgacggcgaaaaccattaagaaaatgcctgaaccggtgcagaatgttacttatcgcgcagcttggttacccatcaatgctgtgcgtggggtgaagaacgccgcgttgaatgtggtacgtgccgttcgttggcatagataacgtattttatactgctgtttatggaggtgccggcggctaatgtagccgccggcacctccataaacagcagtatctgctatgccatgttcttgactttgcgatcgtatatacccttctcgaacaggcggattttttgtagtgccgcgcattgtagacgttgacacgtagtcagacgttcaagaagctcggctttctttttcagatctgcctcgtactgaatccggttgcttgactcgttgatatctggtgcagttgcttcctcattgacggaaccgatcagcgtgtagtagctacgcgccggcatcacaccgtgttcaagcgcatattcgaaattcgtgattccagccgccacgttgtcatggtagaagctgaaactacgttccttgtgtgttacagagcctgcagattgcagccaataatacaacacgcaatcaatatcggctactttgttcatacgcgcgtacagtcggcctgcgaccatcacatcctgcgcatacatcccctctgggaaccgaatgccatcccacaactcacgtttgtacagacgacaccagttcgcttcgttaaaatatcgtgcttctgtcttatgtccggtatattctcctattaatcggagagttttgctgaataccgtttgataagcaagcaacggactgttgaaaacacttatcatttttggtgcgacagtaccttgcagagcttgatgcgagttattttctaattgggaaacgccgaattgctgccaccttgctttgctcatatctgcaccagtgatttgtaaagcatgcagtaagtattcgatgttatgcctgtcgagtatatcgtcattatccgcgaaagcgatatagtccccgtgagcgatatccaaaccggtattttgcgctttggcaattccgccattttcttggtggattactttgattcgtgaatcgctagctgcgtaggaatcgcagatacttgatgatgcatctttggagccatcatcaatgagaattatttcaagatttttgaatgattgggcaagaatggattcaatacagcgtgataaatatttttccgagttgtagacgggaacgatgatggaaataagtggttctatattgggcatagtttctccgggccaaaagtacatgtatcggaatttaagcgttatccatctgtgatgctatcacgtctatcaaatagggaagcttttacccgttgtctaaatgaaagtgcaacaccccgttagattggagattgtctagaaaaccagtccggaagggatgttgcacctatgggggaagtgtattcgcacctgtcggaagaggaacgccaggtcatccagatcgagatcggcaacgggaccggcatacgggcgatcggcgcgatgatcgggcgcagcccgtccaccgtcagccgtgagatcaaacgcaacacgtggttcccgtccaacgagagcgaatcctaccgtccctatcggcccaggcggctcaagaccgggccttggacgagccgccattacatcgccgggccggcccggcgcaaggccgcccggaggcgcgccaaagcgcgcaagccgcatcgcctgtcgcatgaccggctgtgggcgtgggtggcggagaagctgggctgcggctggtcgccgccgcccgtcagcggcaggctgcgcgtcctgttccccggcgacgatgccatgcgcgtgtgcccggagaccgtctaccgatggatccattccagcaagccgcgccgcgaacgccgggcccgatgcctgccgcgcggccaccggcggcggcgcaagcatgcgggccgtcgggtgtcgaggttccctatccccggaagggtctccatcgccgagcgtccgccggaggcggacgaccgcagcgggttcggccattgggaggccgacagcgtcatcggcatgggatgcgacctgcacaccgaggccgaaaggaggacccgcttcctcatggcccgtgttatccccgacaagaccgccgagcggagcgtcggggcgcggctggcgatgttcgccccgctgccggcggccgccaggctcagcgtcacgcacgacaacggcaccgggttcgcccgccacgcgcggctgcgcgacgaaccgggcatggccacgtacttcgccgacccctattccagctggcagcggggcggcaacgagaaccgcaacggcatgatccgccgttacctgcccaaacgcacgatcatcgaaccgggcatggcgagggagctccaggagatcgtcgacgagaccgacaaccggcccatgcgagcgctcggccaccgcacacccgccgaggcgtttgccgacgaactgccagacttacaactctgacgaaggcgttgcgcttacaaatagacaacggggttgggcgtcattcgctggtagtgcaccaaaaagcgctgtctgcatgaagccttctacagcagtcccgccatgtagatcggcagtttgaccacgtcattttccacaaccagcggtttcggatgcagcacgtatctggtgccgaccttcttatcgaattttgccttgaatttgtctaacgagaccgtgcggtagcgtttcgatgacttgacctcgatggggctgaccctgtacttcattgccgcgttctcgtacggttcgacgatgaggaagtcgatctccatgcggttcgacgggtcgtcgcgatcgctgcgcgaatagaagaacagccggtgcccgttgacccggagaagctgtgcaacgacgttctccgcgagcatgccctcgttgatctcgatgcgttctaggaggatgtcccggtacaggttgcttccggtctgttccgagtcggccagggcgagcgtagtgagaagccctgtatcggcggcgtagcatttgaccgtcgaatggtcctcgctaatgctcaagcccacgctcggatcggtggaattgaaacagtcgttggtaatgaacgcatcggaaagccagaagaaggcgtcctcgtaatcgcgggttttcgctttctctcccagcgatgtgatgttgaacttcttctccttcttggaaagctgacccaccaggttgtcgaagatgcgcgtgatgcgtatccggtcgctgccgccatgcttggagatgtcctgcctgtacagtcggaggatgttccgtttgacgttgtcgactttgctgaaatcatgggtctcgacgtacttcgacacagcctggggcatgcctccgaccagcatgtattcacggaatagccgcatggctttcctgtgcagcgaatcggggagcggcctgcgcttcttgaacgagtccgcgatgagcgcggacagtggcttttctcccaaagcccagaggaattcatcgaaatccatgggattcaggcggatcgactcctcctctgatggaatgaggatgtccttgacgttctcgcggatggagacgagcgagcctgtctcgatgtagtcgtaacgtccgtcagccaccagctgcttgatggcctcgcgggccttcgggtacagctgcacctcgtcgaaaatgatgaggctatccctcctgtgcagttccactccgtagaaggatgacaggtacatgaagaacgcgtcgaggtcgttgcgcaggtcgacgaagtagcccagcacgtcatcgggggctttcgagaagtcgacgagcatatacgacgcatagttccgtcgtccgaattcctccgcgatggtgcttttcccgacgcgccatgcgccctcgatgagcagggctgtgcttccttgggaagaatccttccaggaagccagtttttcgtacgcttttcgttcgaaagtttccatgtctcaccgccgtagatacaccaaatcaaggataactaaggtgttgtatgtacaccaaatcaagggtaatgtaatggtgggttgctgatcggcttgaattagatttctgacaggtggtcttatatatggtagattctggcgttcgtccggacgtatttcgcttatatgtggcagctcgtttttgtgacagaccggttagggggtaattgtgtaccctctaactgcggtctttctggaatgaactgccatacataggcgagatgcctccggtcagccttccgaatctgccatctataagccagtttgtggaatcgctttatggctatgcacccctgcgatgcgattgaatatccgcggcaaggcaggacgaagaagaccggtaagacgccgagttcaagttcaacatctcgaagtaagtgtttctctggctcccctctttgaggggagctgtcgctacaagcgactgaggagcggcacggataaggcctgagaagtcgtcttctcgggcctttgtcatgacattgttctgcaaggactggctgctgcagcagcataatgtgtgttttattattcggccttggcggcttgctgatcaatccaattgttgacgtcggtgaccgcctcgtcaagggttgctttggcggctttgttgtatttggaatctacaggttggcgatttccgctccgaatggccagagcgcaagcttggccatcttgaacgcttgaatgccgagcgggatgccgatgatggagatgcatagaatcagtcccaccaatgcccatccgattgcgatggccaacccgccaagaatgatccacaggatattgccgagaactcgcatgatttgcccctttccgattccggtcgatgcctcgcatgtccggcttcacttttttgccagacatcatgacggaaacacgagacgcaacccttggctcgcccctgattcatcctcggaccgctacccaggcggatcgtatgcggtaggcccaatccttttgtaaagattttgtgtattgtcgggcatgcgtgggtttcaccgtcgatctgaatgatgataggcttctcgatgtctgccgtacgaagacccatcaaggagatgccatgaacctgtatcgctacgcgatgttcatcgcacacgcctgccgtgggtcgttcgtcggcaatattctgtttgccaatccacaaatggccctattctcgatgctggtgtagcggggacacgccttatgccgggatgtaccgatggcccatccgcagtcgacgtcgcatgaatcgctcaccatagccatcaacttacgcaaagccgcgaatcgtttgccgtatatgaatgcggaacggatggcggcttttcctttaccccggactcatcggtgtccccgcatcttgacacaagtatgaggccggatcgcccacacatgccgttaccaacagaaggaaatgctgtgacctcacagaaaaccgcggaatccgggtccgccgccagttccgtaaagcctattgattcgcacgcccgattcatcgtcgtgggcgtgatcgtcgtcggctcgttcatcgcgctgctcaaccagaccgtcatgtcaccggccttgccggcactgatgcgtgatttcaatatcaccaccggcaccgtgcagtgggtgaccagcgtctacatgctggtctcgggcatcatggtgccgatttcaggctatctgattgataaattctccacccgaaagctcttcgccggagcccttgccactttcatgatcggcacactgctgtgtgccgttgcgccgaatttcgtgctgttgctcatcggacgcgtattgcaatccgccggctccggcgtgctgttgccattggtcgccgtagtgccgatgctcgtctatccgccggataagcgcggcaccgccatgggcatggccggtatcgtcatggccgccggcccggctatcggcccggttgtcggtggtctggtgattgacagtttcggatggcgcctgatgttcattggcattgcagtcgtggcactggtcatccttgtcggaggcacgatgatgctcaagaacgtcagcgagttgaagaacccaaagctcaacgtcctgtccgtgatcctttcgaccatcgcgttcggtggcctgctctatggcttctcgtccgcttccacgatgggatgggccagtccggtcgtcattacctcaatcgtcgttggtcttgtggccttcgtcgcattcgtatacaagcaagtcaagctcgatgagccattgttgcgcgttgacacccttgccacccgcaacttccgcaactccgcgattctggtcactctgatcaacgccgcagtcgccgcaaccaacgtgacgttgcctatcttcatccagaatgtgctcggccaatccgccaccgtcaccggcatggtcatgctgcccgccgcggcggtcggcatcatcctgagtccggtcgccggtgccgcattcgacaaattcggcccgcgcggcgtgggtatcggcggccttgcgctcatgaccatctctcttggtcttctcggcaccatcagcaccaggacatcagtgctgtttgtcgccgtgttctgcgcattgcaggcatctggtcaggctatcgccaacatgccgatcaacacttggggcgtcaacgctttgccgaacgacatgatcgcccatggcaacgctatcgccaacaccggccgccagatcgcggcagccattgcgacctcgcttctggtcaccgcagaaacatccgtgaccgcctcgcacatgtcccagggtgtgaagtccgccacggccagcggcattgcgttctcctacctgctgtgcgccgccatctcgctggtcgccctgatcatctgcatcttcaccgtcaccagccgtgccaaggagaaggccgcacgcaacgccaaggcctacgaggcgcaagcctccgccgaagtcgcggccgaaaccactgaaggccagcccgccgagcatcactacgccggcgcatacgtggcccccgcctcctccctgttcaagcaggcccaggaacagtccatcggcgggatcatggacgatcagccctacagctgcttggacagcgatgacatcacgcatgtggtgcgcgagttcatccgcctcaacgtttccagccttcccgtggtgaacggcgatggcaggctcgtcggcttcgtcagcgacggcgatgtcatgaaatcgattgccacctatgaatcccgtacggtttccaccggcaccggttcgacgatggtggtgttcgacgacgaaaccgtggcctccaaggtgcaggcgctctccggcaagaaggtgatggacatcgccacgcgtaaggtcgttgccgccacgcccgaccagcatgttggagaggtggcccgaatcctcgccaagaagcagttcaagaaactgccggtggtggatggtgatggcagactcgtcggtgtgatccgccgtaagtccgtgatggaacatgccttcgacgcgctgttcccagaggatgatcggtgattcggcgtcatcatcgctgaatagaatgaatggaatatgaggcttcccttctcacgggggaagcctcattgctttgtccgcggagtcttacggcacctgcgcaagggcaacgtcacgctttcatgatgcactattgaatagtgtgttcctatcgttgcgtggtgacgctaacgcatggcgtcacgatactgaagcctgccatctaacggcgggtgcggctcgttgctggagtcgtgcacgcatacgcgcgtcggcgtgcgtatgccgtgatgtgacctttgtagtggaattgaagagttgagggacttctgctgttttcgtgggttaggttcttggttgtggtaggtgtatgtcgagtccgtcgcagcggagcatgacgagcgcgatgaggctgcctgaagtggcctgatttctgttccccttttattgtgagacggcttgtgccgcttggtttgcatgatactcggtttcgatctgttccggtgtcctgcagcccagcgactggtggagacgcttcgagttccaccacgagacccaccggaacgtcgccaattctggctcggccaggtcggcgaatggcttgcgccgccacaccagctcggtcttgtacgcgccgttgacgctttcggccatggcgttgtcgtacgagtcgccgaccgtgccggtcgagggaagcatgccgtgttccctgacctgggtggtgtacaccgtgctgatgtgtgtttttgtcaaattgaagtagtccagaatggcgtgtcaattcaatctcgtgctctacgggcccgtcggcaccggcaagacgcatctcgcggtcgcgtcgggcaggctcgcgtgcatgcgcgcggtaccggccgggttcttcaccgcgaccgggctgctcatgcggccgcgccgcgcgaaacgggggcggctcgacgcggagctccggcagatcgccagggcgaggctcccggtcatcgacgagttcggctacatgccgatcgaccgcaccgtgcgccacggaaggctcaccggattcgagggaggctcctaccgtagcgagcacgccctcatgaccagatagccgggaagaaaagggcggcgggttccgacggcgcggtttctgttggaaaccagccgcctacgccgctgaaaaagtgcccatactgtggacaccaacttgcagaaacacaatccgcacgctccgtcccgggatgcccggtcatccagtagtaggtggagcggggaacgcccggcatcctgcatcgcgctgatatcgggtagcgggcggtgttggcccgtatcacgcctgccttcgtgcgaataccggcaccgcggggtcgatcgcgcgatgtcgtactcggccctgatctcccgggatggcttgccgttctcgtacaactgcgcgatctgccgtttgaacgcctcgtcgtagtggcgggggatgtttcgggccggccatcgtcggcctccaatctcatgtcattcgtccctcatcggactgtctaatacattgtagccacgccgatcgcggcgaggccgtcgaacggcgagggcatcgccgttccgagccgttcggcgacccggcgggcgatgtctcccgcggtcctccatacgatatgcgggaaaccgccgaccgtcttctggttcgcgacgctcaccggccacgcgcactccgactcgaagtcgcgcgtgaaccggctgcccggctcggcccacggcacccgggcgaccacgaccccgcacttcgggcaatccacccgcggcatgtcggcgacaagacggccgtgtatatcagccaccggttgtcgtcgtgcaagttctgcgacgacatcgccgtgtccgaccatggcgcgatcgtccagtatggcacacacgaccagctcgtggccgacgaaaacggcaagtactacgagttgtgcatgcgcaggcgcagtattacgtcaaggagtaggcgccgcgggtggcagatgcattgtcgtgcgtcggcatgggcggcagcccgacggtgccgcccatgccggaaggccggtaagtacgggcgcccgcggccggtcagagcggcagcaggtcgctcaggtcgtcgcgctcgccgacggcggtgatgcgccccgcgtccttctcctgggaccatgtggtgatgccggcggcgagacggagccacacctcggggtcgagctcgatgacatcgggcggtgtgagattgtgcgggtcggacgccgggccatccaggatcttcacggctccccatggtgcgactcgcacttccacgccggggccgggcgccttgcgctccagcagatataaggtgtatcgcaccgccatcgcccatgtcggtcggggcagcgccggcatcagggactccgagtccgccccgtcctcgcgcagtcgctgcgctgcgtcgttccactgctgccacgcgcgctcgcccgcgggtatgtctcgttctcgaattgcggccatgactccattgtgcctctaggggtgacgattgccttttcgcatcggccggcggttctcggtgcggtttcggatgctttgcatctttgcaaaagtgtttcatcgggcttgcgtcaggtgttgcaatacgttgttttccaacgtggcaacgttttctgtcgtctcaagatgtggttgatatatagccgatttggcgtatttatggcaaatcctgtatgatatttcatgtttctgcaaacgattgcataacgttacgcagcgttcaccggaacttattggcgtggtcaccaagccgtcgcataataacacaggaagcataatccggaaagagagtcagacatgactgaaatcactgcacccaagtcacctgtcacgaccgccgagttcgcggacggcatccgcgaacagctgaagtacagccaaggcgtcaccgtcgagcaggccacccccgccgacgtgtacgtcgcctcctcgctggtggtccgccactacctgcaggacgcatggttcaagacccagcaggacatggtcaatggcaacaccaaggccgtcggatacctgtccgccgagttcctcatgggcaagcagctgcgtaacgcactgctcaacgccggcatgatcgaccagttcgacgaagccgtcaaggacctgggcttcgagccgcaggacgtcatcgacgtcgaacacgagccgggcctcggcaacggcggcctcggccgtctcgccgcctgcttcatcgactcgctcgcgtccctcggcgtgcccgcgttcggctacggcatccagtacaagtacggcatcttcgagcaggccttcgacaaggacggcaagcagatcgagaagcctgactactggctgaccaacgaagagccctggggccacatcgactacaaccgttcccagaaggtctccttcggcggcgaagtcgtcgaagagaacggcaagaaggtctggaagccggcctggtccgtgcgcgccgtgcccgtcgactacatggtccccggctacgcatccggccgcgtcaacacgctgcgcctgtggagcgccaagagctacgacgaattcgacctgctcaccttcaacaagtccgaatacctcgacgccgtcaagccgcaggtcaaggccgagaacatctccaagattctctacccggaggattccaccccgcagggcaaggcgctgcgtctcgaacagcagtacttcttcgtggccgcgtccctgcacgacgccatccgcgtgttctaccccgaccagagcaagcccgacctgaccaccttcccgagcaagatcaccttccagctcaacgacacccaccccgtcatcggcatccccgagctcatgcgcatcctcatcgacgagtacggctacgactgggacaccgcctggtccatcaccaccaagaccttcaactacacctgccacaccctgctgcccgaggcgctggaagtctggccggccaagctgatctccgaactgctgccccgccacatggaaatcatcaacgagatcaacgagcacttcctcgccgaactcaagaccaagacccgtgacaaggccaagatcgagcgcatgcgcatcgtcaccgacgaggagaaccccaaggtccgcatggcataccttgccaccgccggtggctcccacgtcaacggcgtcgccgaactgcactccgaactgctcaaggacgtcacccttcgtgacttctccgacctctacggcgacaagttcaccaacgtcaccaacggcgtcaccccccgtcgcttcatccgcctcgccaacccgcgcctgtccgccctcatcaccgaaggcctcggcaccgacaagtggctgagcgacctcgaactgctcaagggcctcgaacccctcgccaaggacgacgaattcgtcaagaagttcgccgccgtcaagcaggccaacaaggaggacttcaccgcctacgccaagcgcgaatacggcttcgacctcgaccccaacaccatgttcaacaccatggtcaagcgcctgcacgagtacaagcgccagtccctcaagatcctcgcgctgatcgccaagtacgccgacatcaagtccggccgcgtctccgccgacgacgtgcttccccgcaccgtcatcttcggcgccaagtccgccccgggctactacctcgccaagatgaccatccagctcatcaacaacgtcgcccgcgtcgtcaacaacgaccccgacgtcaagggtaagctgcacgtcttcttcccttggaactacaacgtccgcctcgcccagcacctcatcccagccaccgacctcgacgagcaaatctcccaggccggcaaggaggcgtccggcaccggcaacatgaagttcgccctcaacggcgccctcaccgtcggtacgttggacggtgcgaacgtcgaaatccgtgagcgtgtcggcgccgagaacttcttcctcttcggcatgaccgtcgacgaggtcgacaagctctacgaagatggctactcgccggccaagtactacgaggccgacccccgcctgaaggccgccatcgacatggtctccgacggcaccttctccaacggtgaccgcaacacctacgcccccctcgtcgccgactggctcaccaaggactggttcatgaccctcgcggacttcaccgcctactccagcatccaaagtgagatcgaagccctctaccgcgaccccctcgagtggaaccgcaaggccgtcctcaacgtcgcgaactcgggctacttcagctccgacaggtcgatccaggattatctcgacaacatctggcacacctccccgttggcctgattgcggagcgtcctcgtcgttgctcctcagtcgcggtacttttgtaccgtttccttcggtgcgcctagaggacgcacacgtaatcagtccaacgggctgcgcccgcttgccgactgacggcgtgtaacgtgattcgcccccgctggcgggggcgaattttgttttacatcactgcgcagcgcagcgaatggcgaacacggcgactgcggcgattagcagcaggaagccgcttgcaagcatcgccatcaccgggcttgctcggcgtggtcggctgctggtcaccattcgacgcgatcgcgaccgcgaacgacgcggatacgcctgagtctcgatgttcaacgatccgggaagatcgtaatccaaggtcttcgcctcatcgaacgtccagctcacccaaggctcgggcttcacactgcccttggactgccagtcgccccacgcggtgtcggtattgccatcgcataggttcggaaccggcgtcttgctttgcgaatacgatgctttgagcttgccggcaccgcatacgttgctgccgtttttcgatcgtggcggcggtggggcatgtctcgacgaagaggggcaaggttggaatcgccatgcagtgagccatccagagcctcaatgcggcacaatatgcgaaaagagcctgtctgcgaaatgcagacaggctcttttcgcggacacatgtgtgcctacaacgattgactgttaaatgaactcaggcggcttccggggctgcttcggcctcatcggcgtcgcccttgtcggcgtccttggtcaggccaaggtcgaccggggacgagctgttctcccaaggctcctcccacggatcataatccgggttctgctgcttgtagatgtacagaccaaccacggcggccagcagcgcaccaaagaacaacgcaaagaacttccaaccgtttgaagacttgttctccatgacggctcctttcccaatcctggttggcttgcccgttcaaaaccaactctgggttccatcttaattccaaaaatgtggcgattgcgtgcgggaatgcttttgctttgccggcggtgcgcacgacgagccgggagcgtgttgtttcaccgtccggcgaggagatgcgattccgctacagtagatgacatgagtaatggccgattcagtttgtttcccggtgcgccgtcggcgcacaacctgttctccaagcgtgcgattcaatatcagtggcggtcgaacggccccgtgttcaccagcgcgatcatcatcgcgtgcgtcgccgtgtgggttgtcgagatggtgttcagcctgttctggcctcttggactcgcaaccatgatctattacggccggttcgacccgctgacggcggtcgcacaaccgtggatgttcctcacgtcgatgtttctgcattcgccgaagtcggtgctgcatatcctgttcaacatgctggcgttgtggagcgtggggccggtgctggagaagatgatggggcattggccgtttctcgcgctgtacgtgctttccggtttgggcggcggtcttgggctgatgtcctgggccgcgctgtggccgggtggcaccgggtggcttggtggtgcctatggcgcgtccggcgcgttgttcggcctgttcgcggcgatgctagttgtgtaccggcgcatcggcgaggatatccgttcgatgctggtctggatggcggtcaacttcctgatgccgttcctggtgggcggcatcgcatggcaggctcatgtaggcggattcatcgtcggcggcgtgttcacgtggctgctgatttccggcgtgcacgcgttgcgcggcaagagcctgacgttccggacgatggtgtacggggcggtggtgttggcgctgatcgtcgcaggcgtgctggtctgtaatctgagcaatccggctctgacgtacatcatgtgattggcctcttacccggtgaaagtcccacctggcgcgacgtgttcgagaacagcaggcgccgttacgggtacaggcgcgtccacctggaattgaggggcgtgggcgtcgtcgtgtccgccaaacgggtcatgcgcctgatggcccggcacgagctcgtgcccgtgtccaggagcgcgaggcgctactcctcgtacaggggtgagatcggcgaggcgcctgtcatccactcggaccgcggctgccactaccagtggccggaatggatacgcatctgcaagggccgcgggctgatccgctcgatgagcgcgaagggctgcagcccggacaacgcggccgcagaggggttcttcggccatctcaagcaggagttcttccacaagcgcgacttcacgggcgtcacggtcgacgggttcgccgacgatgctcgacgagtacatgacatggtaccgcgacgaacgcatcaagaccgagtacgggatgagcatcatggacaggcgcatcaagctggggctcgtcggctgaacgcatgtgataacctgccagacaaccatacagacaacgaagtccaacaaaacgtcaccgcccccgagcttgtgatgggacttttgtggggtgggcggggcactggagaatggctcggggtggaggcgtcgcaccaatgtgaattacatgcgtgtagttttccacatgatgtggagaactttgtggacaacttgggtataagttgggtataactcgtggataactatggtgaataagtccgtgtgagctctaacaatgttggaaataatgggttttgacacattgtggacaatgtgcacaatgcgaataagagttatccacaattgtgtataagtatgtgaataatgtggataacatggggaaaaccggtggatagatagtgcacaacttgatttgcggagcatccgttacgggtctcgaagccggggcgcgatgacgctgccgggataccatgacactatggatatttcgtctcagaccagtcggttcattgcggcgcaccgcaatcaggatgtgcgcgacctggcgctcagcgccaaacgcgtggacgggcttgacctgccattcgcgctcgaccagatcgccggctggcagactgcgtgccgcaagctgccgcaatgggccgagaccgacggcatcgtctatccgccgcacatctccatggaacagtgctcttcccagttcgccgcgcagtacaaggccggcatcgcaaggcgcgtagcgggcgccggcggtgcgatggtcgacctgaccggcggattcggcgtcgattgctcgtatatcgcgcgtggattcagccgggcggtctatgtggagcgccagcctcacctgtgcgagctcgcggctcataatttccgggcgctgggactcccgcacatggatgtgatcaacggcgatgcggaggattggctgcgcggcgtcgttgacgcccgcgccgcctccgcagactcggccgcagtcgattcagctacagccgttcccatcgcgctgatctacctcgaccccgcgcgacgtgacgcgcatggcggccgaacctatgccatcgccgactgcacgccggacgtactcgcgctgaaagaccgtctgctggccgtctcgccgcacgtcatggtcaagctgtctccgatgctggattggcgaaagacggttgcggacttcaacggttcggtcggcgaagtgcatatcgtctccacaggcaacgaatgcaaggaactgctgctggtgctcgaccgcggttcgcacgacgccgtacgcgtgatctgcgtcaacgatggcgacgtattcggatacgtccatgacatgaagaccggcgcggattctgacggcgtggtcctcgcctccgcaggagaaaaaggcagtcagggcgggtctgcagagccgtcacacgccgctccggaacagcccaggtatctgtacgagccgaacgcttcgctgatgaagggcggctgtttcgcgctgctggaggaccattatggtatgcgccagatcggtccgaacagccacctgctgatatcgggcacgccggcgccgcagtttcccggccggggatttgtcattgaaaccatcgcgggtatgggcaagaaagagctgaaacgggctctagcgggcgtcgacagggcgaatatcgcagtgcgcaacttcccgttgaccgctgtccagctgcgcaggaaactcaagctggcagacggcggcgatgtgtatctgttcggcacgacatccgtcgatggccgtcatgtcatcgtccgcaccgtgaagcagtgaaaccgcgaaaagggtatgacagcaacacagtttggcggtggcgcagcaccatgccgcgccaccgccaaaccgtaacgtcgcttaccgtcgatatggagctggctgccgcgaggggatctcgccgctcagcgccaccacatcgtcatgatgaatccgaccataatgatcgcgaaggcgattgccaggttccaagcgccgatacccgggatcggccacgtgccgttcggcgacaggtagtagaccacggcccagatcaggccgatgatcatcagcgcgcagaacagcgggacgaaccagcgcgggttcgacttggtgcccttgatggtctcctcgacgcggcgcgtgttctccgcctgccgcgacatcatgcgctgcatctgcggggtcatctctgacttgtcggcggtggcgttgagcaccgcctgcaccttgtccatggagacgccgtaatcgtcatcggcctcgtcggtctcgttggtgtccgtgtccttgacgtcggcgtcggtctcggcctgccagtccttctggtcttccgagtcggtttcgtgcagctctgtgtcagccataagcgtagtctccattcaataggctaaaaaatcataatagcggttacactcgaaagttgaacacactgggaggaatcatggccagacacaccagcaggcacgccgcccggcgcacgtggctcggcggcttcgcggtgtgcctgatcgtggctttttccgggtatctgctggtgacgaacgtgcgcgtgaaccgcacggcaacggtcacttccgacacggcggacctggtggagcagcgcgtggagcatgtcgaccagctgcagaaggacatcaccgacctgagcgcgcagatcaacacgctgaaggatttcgccaacaacagtggctcctccgagcagccctcgggcacgagcgaccccaagcccagcgacaccgaggacgcgggctccggcaccatactgccggcggtgcacggtcccggcatcaccgtgaccctgaacgactccccgttgtgggagaacatggtggacagctcgggctcggccgcgaacatcaacgattacgtcgtgcatcaggaggatgtggaggctgttgtcaacgccctgtgggcgggcggcgcggagtcgatgatgatcatggaccagcgcgtgttgttcaattccgcagtgatctgccaagggaatgtgcttctattacagggcaagaaatactcgccgccgttcaccgtgtcggcgatcggccccgcagatgccatgattcgggctttggacgactcgaacgcggtcaagttgtataaagagtatgtcagcgcattcggattgggctggaaagtggaaaaaaaggacgatctcgtgttcgggcagtctgcggcgacgctgcagccgttgcggtatgcgtccgtggtcaaggacgggagcgaggaatgaagcattcgcgcaactctcaacagattcaaggcgattttcaggatttcgaggcgcctgcccctgctgaaccggagtacgccggggaagtgaccatggcgctgcctccggtgccgatgcccgatccgaacgcccggcgcggcctcgcgcagccggcggccaagcgcagcgttctgtggtcggtgctggggatcctcggcgaggtgctgatgacgctggcggccgtctgcgcgctgtacgtggtatggcagatgtggtggaccggcgtccagtccgagcacacgcaggtcgagacccgccagtcggcgtcatggtccgatccggccggcggcgacagctcgaaggtcgccaaggcgcaaagcggcgacgtgccggtccagccgacgagcgcaagcgatggcgagctcatcgcgcaggtgtacgtgccccggttcggccaggggtgggtgcgtaacgtggtcgaaggcacggacgaggccgaattgtcgctgcatggtctgggacattatccgtccacgcagatgcccggttcagtcggcaatttcgcggtcgccggccaccgcaacggctacggtcgaccgctgggagacgtcgacctgctgcaggagggcgacgcgatcatcgtgcgtaccaaggactactggtacgtgtacaagtacacgacatacaagatcgtcaccccggagcactccgaggtcatcgccgctaacccggaggatctcaacacgcctcccagcaagcgcatgatcacactgaccacgtgcgagccgaaatacaccacggccacgcatcgttggatcagctacggcgagctgagctattgggctaaggtctcggatggcgtgccgcaggagctcgccacgtcgtcgaactcggcgaaggtggcgttctccagcagcaacacgagccagtcgttcgtgtccaagctgggcacgctgcagcccatcgtgctgtgggcgctggtggcgtacctggtgctgtacatcgcggccctggtggcctggcggtacccggtgctgcgcgagattcgcgccggcaagcgccgccgtccggacgcgagcatctacggatggctgctgcgtcaccagcccggtccgctggtaatcaggtgggcgctgctgatactgctgctgttcatcgtcagcgtggtgctgattcagtgggcgtgcccatgggcggcaagcaacatccccatcctgcaaagcatgtcgaattacgcggtcgattagcggcatggccggttggcggcgataatgggaacgtatgggatggcggtcggcgctcgccggtgccatcccataatcagaacgagacgaggagcgtcatgacggattcggcacgcattgtggtggtggacaattacgattcgttcgtatacaccatcgttggatatctgaaaaccttgggagcgacggtcgatgtggtgcgcaacgacgcaatagacccctcagatgcctctgtgctggacgaatatgacggtgtgcttatttcccccggtccgggcgctccggcggattctggggccagcgaggacgttattcggctatgtgccaagctcggcaagcccatgttcggtgtgtgcctcggcctgcaggcgctcgccgaggtgttcggctgcacggtcagccacgcgcccaccatcatgcacggcaaaaccagtctcgtcgagcatatcgatgatgagatcttcgccggtgttgccaatccgatgaccgcgacccgatatcattcgctggccgtcgagcccgacaccgtgcctgatgacctggtcgtgacggcgtggacgaaggatgaccatatcgttcagggcatcaagcaccggtcgttgccgatgtatgcggtgcagttccatcctgaatcggtgatgacgcaggacggctaccggctgctcgccaactggctcgccgtctgcgggcagaccaacgccgtggccaagtccatcggtctgcagcccaaggtcaaccgctgacacgcacgtgtgtgtggcgccgcgcgtgacgcgtgacgcgcatgacaacgatgatggcccgtggcattcctcatgccacgggccatcatgtgttctgggccgatgtgtgtagactgcgcggctgggccgcccgtctggccgatcgacccgccgcgattgccggttgcgcttaccggccgtcaggcggccgatcggtcacaccgcaatggcaaccacggccattcccggcggttcagttcccacctgtcgtcgtgccgccgttgccgttgttgtcgggatcctcggtggtgggcttcttggcggtgaccgagatggtgctgcccttgtcgacctgcgtgccggccgcgggatcctgcgtctcgatgaccgcatcatcggtcgcgtcgccggtgaccttcagcgtgaagtcgctgcccagcgtggccttggccttggcgatcgtgttgccgaggagattgggcacgctgacctgcggcttgccggtggacacgtagaccgtgatctgcgagccctgcagcaccagttctccggaaccggggctgactcgcgtcaccgagcccttctccaccttgtccgaggcctcctgctcgacgaccggcaggaacttcatggacgagagcttgtccagcaccgtgtccttgggctggccgaccagaccgtccggcaccttggtcatgcccgaggagatgtacagcgtgatcgtcgtgcccttgggctgcgacgtgccggaggccgggtcggtgctcacgaccttgtccttctcgatggtggcgctgtcggcggtcttcgtgacggacgacaccttgaagcccagtttctccagcgcgttgcgcgcatcctcctgggtgtagtcgctcaggtcgggcacggtcaccgacttggggcctacggagaaccagaccttcacgtccgagcccttgacggcctgagtgtcgcccttgggggactgcttggtgaacgtgccggcgggttcaccggaatccgaatcctgcatctccacgaagttgaacccggccgaggtaaccttctccttcgcctgcgccttggtcatcgtcgccgtgatggtgggcacggtgcccatctccgtggcggatttgcggctcatggtgtagatcacgccgaagatgatcgccagcagcaccacgccgctgatgatcgacgcgatgatgatcttcttcttgcgcttctgcctggccgcctccgcgcgttgctcggcgcgagacttgaccgccagggcctcgttcgggttctgcgccggaggcaccatctcgaactggccggtcgccgggttgtacgcctgcgtgggctgacccgcgccgacagcactcatcggcacggtagcgccgccgtcctgctgctccgcggccttgcgggccttcacgttggccagatcggtcagcgggttgaacgccgccgcgaccggcacgccgccgttcatgaacgtcaggatatcgttcttgaattcggccgccgtcgcgtaacggttctgccgatccttcgccatcgccttcgcgcagatcgaatcccacatgcgcggcaggccgggcacgagcgtgctgggcggcgtcgccacctccgacacgtgctgataggcgatcgccacagccgagtcgccggtgaacggcggacggccggtgagcatctcatacagcacgcagccggccgagtacaggtcggagcgcatgtcgacggtctcgccgcgagcctgctcgggcgagaggtactgcgcggtgccgaccacgccctgggactgggtcatcgtcgcagcggagtcgtcgagcgcgcgggcgatgccgaagtccatgaccttgaccacgccctgctcggagatcatgatgttgccgggcttgatgtcgcggtggacgatgcccatgtgatgcgagtattcgagcgcgttgagcacgccgagcatcacctgttcggcgtctcgctggctgagcgggccgttcgccttgatcacgtcacgcagcgtctggcccttgacgaactccatcaccaggtacggcagccgctccgtgccgccgctgtcggtcatcacggtctcctcgccggagtcgtagatgttgacgatgttcgggttgttcatctgcgccacggagtgcgcttcgcggcggaatcgggacaggaagatcttgtcgttggccaggtcggcgcgcatgatcttgatcgccaccgtacgtcccaggcgcgtgtccaatgccacgcgcacttcggccatgcctccacgccctacaagttggccgagctgatagcggccgttcgccagcgatgccggcatattgctgctcatagctattcctctcgattcttcgggtcggtcgtcgccgtatgcccgccaaattggttacggttcatggtgatcagcgtcgccgtgtgcggtgtgctggatacgcggcggggcatgcgcccgccaagtcccatgatggtctcatccatctgcgcggtctcctgatcgagcagacgtcgttctatgcgcgacagcgtgcgcgaaacggtcagcgcgtccttcggacggtcaagcggatccttggacagcatcgacatgacgaactgccgaagctgcacatctatggaatccggcagcgggggcaccgggtcgttgacgtgtgcggcggcgatgtcgaccggcgtggtgccggtgaacggccgatgcccgcacagcccttcgtacgcgacgacgcccagcgagtagatgtcggattgcggcgtggcctgtttgccttgcgcctgctcgggggagatgtactgcgcggtgccgacgaccatgccatcctgcgtgatctgctcctggttcgtggagtaggagacgccgaaatcggtgattttcacctcgcccgtagtggagaccatgatgttggccggcttgacgtcgcggtggatcacgccgtggctgtgcgccacgaacaggccgcgcgcggtctggatcagtatcggcagcagttccgtcgcgggcagcgtgccacggtcgcggtagatgtcggccagcgagtcgctgggcacgtactccatgatgaggaagccgatgctgtcgtgctcgtaatactcgaacagcgcggcgatgttggggtgcgccagattggcggaattgtgcgcttccgcccgcagacggtgcagcttggcctcgacgttgccctgatcgtcgcgcagcgccttgatggcgacgggacggttgagctggatgtcgtggcctttccacacctctcccatgccgccctgcgccagtcggcgatccaggcggtaacggcggtggatgagttgtccttcgacgagtttcattgtttcagggcctcctccatcagtgaacgcatgatcggtccggcggcttccacaccgtactgattgacattatggataacaacggagaccgcgatcttcgggttgtcggcgggggcgaacccgataacccatgcgtcgttggtctggttggagctgccgatctgcgcggttccggtcttcgccgcgaccttgatgccgctcagctgcaggctgggcgcgtcatgctcgaccaccgactgcatcatctggttgagcttggacgccgtgctggagctgaacgcggtggacatcacttcgggcgtggcttcggacagcgtactcaggtcgctggcccgcacgcggtccaccagcgtcggcctcatgagcttgccgtcgttcgcgatggccgcggcgaccatcgcgttctgcaatggcgtggacagcacgtcgccctggccgatggacgccagcgccaccttgtcgtcggacagcgtgtcggggaacttggcggcgacggacttcatcgggcgcccggacgacgaggtgccgtcgatggtgatcgagcttccgtagccgagcttcttcgcctgctcggcgatcttgtcctggccgagtttcacgccgagctgggcgaacgcggtgttggacgagtatgtcagcgcgtcctgcagcgtgatcttgccgtcgatgccgttcgccgcggtggtggtgttagtcaggttcgtcgaggttccgggcagcgtatagctcgctccggcgggaatctgcgtatcggtgtcgtagtcgccggattccagcgccgtcgcggcgacgatggtcttgaacgtggatccgggcgggtacagctgcgaggccgcgcggttgatcatcgggctgttggcctgcgcggcgagtttcgaatagttcgcggtggctttcttcgtgtcgtgcgtggcgagagcgttcggatcgtagctgggggcactcgccagggtcaggatgcggccggtcttgacctcgatgaccactgcggcgccgtcgttgctgccgagttgctggtaggcgagctgctgcagcttgggattgatggacgtctcgatggacgcgcccttgttctcgacgccggtgaacagcgatttcagctgatcccagaacagcgcgtccgccttgccgctcagcagcttgttgcgggatgattcgatgccgcggtcgccgcgctgggtgaccgagaagaagccggtcaccggggcgtacaccggcccgttcgtgtaggaacgctggtatgagaacacgtcgttgaccggggtcgactgcgcgaggatcgtcccgtcggacgcgagtatggcgcctcggggagcgccgtattcctgatacagcgcccttgcgttgcgcgggtcggagctcagcgagttggcgcggatggcggtgatgatcgtggtggacatgccgagtaccacgaacaaggcgatgacggcggtgaacagctgcctgaggtatttgttcatcgcgcacctgcctcgatgatttccgtggtctggttgttcgccgccgcgtggcggggttccggtggccgctcggcctgcggttcgcgttcgggtgcggactccttgtcagtgcgttccttcagctcgcggtcacgcagcaccgccagcgcctcgtattggaacgtgtcggacagtgtgtccggctccgggcggttcgccgcgttcgagatgatcatcagcagcgcggcgagcaggtagttcgcgatcagcgatgagccgccggcggccatgtacggcatggtcatgccggtcagcgggattaccagcgtgatgccgccgaccacggtgaatacctggaaggccatcgtgaacaccagtccggaggccagcagcttgccgaacccgtccttgatcttcatggcggtgatgaacccggacgcgatgatcagcaggtacagcaccagaacggccatcagaccggtcaagcccagctcctcgccgaccgacgaatagatgaagtcggaattcgcgaacgtggtcagacccggctgcccgtgacccaggccggtgccggtcatgccgccggaggccatgccgaagatgcccgtgaccagctgccacgagccgcctatgcggttgtactgctcgtcgctgaacgggtgcagccatgagtccacgcgctggccgacgtggctgaacacgctggccgcggcgaccgcgcctacggcgaacgcgatgaagccgatgacgatccagcttctgcgcccggtggccgcgtacagcattgcgacgaacatcgcgaagaacatcagcgacgtgcccagatcgcgctgcatgatgagcacgcccatcgagatcagccacaccatgatgatcggaccgaggtccttgatgcggggcagctggagtcccagcaccttcttgcctcccacggcgagctggtcgcggtggtcgaacaggtaggcggcgaagaagaacgcgaggaacagcttggcgaattcggcgggctgcagcgaatatccgccgatgcggatccagatcttggcgccgttgatgttgcgccccagaccggggatcatgggcgacagcagcagtatcaggcctatcaccatgttcacgtacgagtatttgcgcagcacacgatagtcgcgcatgaccgccacgaggatgccacacagcgtcagggctatgcacaaccagatcagctgccttgagccgaccgaggaattaccggacttgtcgatgcgcgcgatcatcaccacgccgatcgcggtcagcatcagcacgcatggcagaatcgcctggctggcgtacggcttgaaccgcagcagcagtccccacagcacgaggaacagcgcgccgaccacggccagcaggccgatgtagttggcggggaagtggccgtagacgcgcaggaacatctggtagaaggcgacgacgctgatcagcatggcgaacagcagcagcgacgcctgacggagacgtatggggatcattgggcgtcaccgccgtctgtgccggtggacgatgcgtccgtgccggtatcgcccgcggtgccatccgcagtgccgccgtcggtctggctgctgccggcgcttgagtcgccgtccgtgccgttcgacccggatgagtcggatgagtcggacgtgccgttgcccgcgtcgccggacgacttggacgtgttggaattgtcgttgaagttgcttttctcctgacggatgacctgcacgtgctggatggcctcgtcatagctgttgaaggtgatgccgtcctgcagctggtcgcgccacgcctgcggcagcgagtcgatgtcgatgttcgtgcgcttgacctcgtgcgacagcgccaggccgaacacgttggtgttcacgccttggtacacggccaccacgccgtctgcgttgccgatgaagtatttcgtctggctccagcggtaggcgccgaaagcgccgcccgtggcaagcgcgagcgcggcgatcacgatgaggattgcgatcagacgattgcggcggccgcgcttgcgcgtctccttgcgctgcgtctgccgctcgtgatggatggccttggcgacgtcgggatcgttgggatcgtcggtgacatggccgtcacgcttctggatgaccggtatctcgccggtgtcggggttggcgcgttcgccgttctcctcgcgcacggccgacggctgcgcgacgcgcggcgacggctgcgaggcgggctggctctgtatcagcgcggcggcgcgttgcgctggcgatgcgttcgcgtcgcgcagcatgggcgcggtggcgacaggctcgttgaggatgtctgcgatgggctccaggctggcgctcgccgctccggcgaccagtggggtctggtggggcaggtcgaaggcatccgcgtcgagagccagcgtggcgtcggcgatgaccgcggtcacgttgtcggtgctgccggccttcaaggccatcgaaaccagctgctgggcgcattcctcctgatcggagtaggtggtgagcgtctgctcgatggtggaatcctccagcacgccgcacaggccgtcggagcacagcatccaacggtcggttggatgggcggcccgaatggcgatgtcggggtgcggatcgatgtcgaagtcgccgagcacgcgcatgacgacgttgcgctgcggatggttgcgcgcctccgcggggctgatgcggcctgtgtcgatgagatgctgaacgtagctgtggtcctgcgtcatgcgggtcaggcgaccgtcgcgcagcaggtacgcgcgcgagtcgccgatgtgcgcgagcacccagtagcctgcgaccagcgccacggcggtcaccgtggtgcccatgccggcgagcttgcgctcgcgcttcgccttgccgacgatcgcgtcgtgcgcggccatgacggacgtttccatcatccgggcgacggtgctcacatcgccgttgacgtcatcgtgctcgatgtgggcgagtgaacggatggcgatggtcgaggcggtgtcgccgccggcatggccacccatgccgtcgcagatcgcgatgaggtgctccccggcgaacgcggaatcctggttgttggagcgcacggtgccgacgtcggacaccgtggtcgagtacaggaacaaggtctgtgatgcaacggaatttggcatgagccgtcacctcaattcgaaggtggtggcgccaatgcgcaccggcatgcgcgggggcagcagcatgggcatgttcagccgctgctggttgacgatggtgccgttggtgcttcccaaatcctcgatcgcccattgaccggaggcgggatccttatatatgcgggcgtgatgcgaggagacgaattcgtcgtcgagcaccacggtgttggacgcggcgcgtcccagcgtgatggattcgctggtcagcggcacggaggcgccggccttcgggccatcgatgatgaccagcagtgtgggaccggattgcggcgtgcgctgctggctttggcgcggcggcgtaacgggcgcggtctgtgcggcggccgggccggacggtgccgggccgtcagaggatttcatcgcgcgcttgtctcggcggcgtcgggcccgcgacggctgcgggctgaacgcttcgatgtctttgtgcagcgatcgcaccgcaagccagacaaagacccacagcaggatcaggaatccatacttgaggatcgcaaatgtcagttcggtcataacggaaagtcgactcctggctcggggtcactcctgctctcgtgaggaagcccagaacaggatgcgggtgcggccgatggtgatggtattgccgtccagcagcgtcgcggccggcacctgatggccttcgacgtacgtgccgttggtcgagcccagatcgcgcgcgatgacgccgttgggggtcaggtcaatttccaggtgcttgcgggagatgccgggatcgtcgatgacgatgtcgcagccggagccgcggccgatcaccgtcttgctctcggtgagcaggtaggggttgccgttgatgtcaagcatcggatggtcctcggcctggtcggtggtggtcacggggaccgcgttgccctgcacggattcggagctcaggttgaagctgcccttgggcaggtcgaggtcctcctcgaagatgaccatcacggggccgacgaacgcataatgctggctcttggcgtattgcgtgaggttgtccgccagctcgttggcgagcacttcgctgccccactgttcgatgcgatcgaagtcggccgtgctgagcttgaaacggtattcgttcggggctaccgtgcggtcgcggccgaccggcatggcttcggcgtcgatctcgcgctccagggcgctggaaaggtcgacaggcttcaggtctttggagccgaacttggaaaagactccgttgaccgcgccttctacacttttctcaaaacggtcgagaacgctcatggtgatccctttctatatccttacccatcctatacgtcagtggggaagtcaattgtgatttctgaggaaaaagcctgtttgagcgcaaaatttccacttctgacacggcgttgtggggcgtgagacctatttggaccgatgccgtccgcctgatgcgccagcccgcggggcgatcatggggaggcaagggggagggcggccggcgtggtttgcccagtgcggtggctaccgtggtgggcatgaacgatatgacgactcttcatgatgcaatcggcgattttccccgccgcaaggcgcagacgttgcggttctcctgcggtgccccgcgttccgcgaccgcgattggcgacggttcccgcgtgctgttcctgcgttccgacggccctgaggacctggtgacctcgctgtggctgagcgtgttcgacgcggacggcacacatcgggaggtgctgctggccgacccgcgtgtgctgcttgcggacgctgatgacgaggacgtgcctgccgaggagaaggcccgtcgcgagcgcgcccgtgaaggcggctcgggcattgtctcgtattcggtggatgcggctggccgccgtgtggtcttcacgatcaacggtcagctgttcctgaccgagatcgccgaagacggcagcggtcgcacccgtatgctggcggcggatgacatcgccgcaggagagggtgccacgccggtgcttaatccgcgcatatcgccggacggcaggcatgtggcgtacacgaccggcgaacatctgatgctggtcgacatcgcgccgcagtggccgtctgacagtcgtcatgatgacgccaccgacgacgactgcgacggccagccggcgccgcacgcgcacggccaccgctgcggcgacgaggagtcgggcgccccctacgacccctccgccgacaagctcagcacgctgtggagcgtgtatccggacgatgacgccgacgagaacacgtggaagatcggtctggccgaattcgtcgccggcgaggagatggaccgttacgacggcttctggtgggggccggactcccgtcacatcatcttcgagacgttcaacgcggcacctgagccgatgtggtacatcagcgacccggcgaacccgcagacgccggcctctggccgtcgatacgcgcgtgcgctcaccagcaacgccgatgtgcgcctgacgctggcggagctcgcgtacgacgggcatgacgagtatgcgggactgggcatccagcagatctcctggaaccgcaaggactatgaatatgtcgccgcggtgcactggtccgccggccatgagccattgctgctggtgcagaaccgccgacagacgcgtgaccaggtgctctcggtgcatctcggctccgaggcctctgcgggctcggcgccggtcggctccacgaccgtgctggaggagcatgccaacgaccagtggctcgacatcatccagggcacgccggccttcacgccggacggacgcctggtctgcgcgctcaacgacatggacgccgacaccaaccggctgacggtggacggccgcccgttcacgcccgccggctggcaggtgcgagaggtgctcgacgtcaccgatgaggacgtgctggcggtcgtgcagcgcaccccggaactggacggatacgaggcgcccgacggactgagcccgtggcgaggcgacgccgacggccatgacgcccgcagcttcgacgtggtgagcttcgattatgatggcaatgcgctgccgatgaccgcacggcccggctcctggtcggccagccggtgcggcgagggcctggtgatctccgggcgcgacatggactcggcgaaatccgtgatgtcgcactccttcacgctgcgcccggtcgacggggaagccgcgccggaaaacgatggcgatggctccgccgcgatgagcacgctcgtctgcccgatcgacaaccatgccgccgaacccggtttcgcgccgaacgtgcgcttcgcccggctcggcgagcatcgcctgtacacggccatcatcgcgccgagcgccgatagcccgtacgcgaaggccgacaagctgccggtgctgctcaagccgtacggcggccccggattccagcaggtcgtgttcaaccaggcgtactactgggacgcgcagtggtgggccgaccagggcttcctggtcgtcaccgccgatggccgcggcaccacaggccgcgggccgcgatgggaccgtgagatcttcgagaacatgaaggacgtcacgcttgccgaccaggtggaggcggtgcatgcgttggcccaggccgtcgaggagctgaaccgcggcaccgcgcaggacggcggcgcgtcgcgcatccccgccccggacctcgacaaggtgtgcatgatcggctggtcgtacggcggtttcctatcggcgctcgcggtgctggacgccccggacgtggtcaaggcggcatgcgccggcgccccgcccaccgattggacgctgtacgacacgcattacaccgagcgctacctcgggctcgacccggcggcgtacgagcgcaacagcatcatcgccgacgcgccgaagctcgcccgcccgctgatgctgattcacggcttcgccgacgacaacgtgaccatcgcgcacagcctgcgcctcagtcaggcgctgatggccgccggccgtccgcacaccttcctgccgctgactggaatcacgcatatgaccaatgacccggtcgtcgcggagaacctgctgacgctgcagcgcgacttcctgcgcgatgccctcgacctgtgaccggtcgcccgtttcggggcggaatggaacggcatcccgccccgaaacgcggcaaatgcgacatcggcggcgattgtgcacagtatgtccgatatcgcgttcgacatatgggcggttcgtgtccacatatgacctcggcggtgcgctgtgggcgaatccagctcttacggctggggatatactctcactgagcatgatcgggcggaagatacgaaacggggggtttggtgcgtacgatttggcgaatattcacgcgcgacctcatgcgcatcctgcgcaacccggtcgcggtggtggtgacgctgggcgtggccatcatcccctctctgtatgcatggttcaacatcctcgccaactgggacccgtattcgtcgaccggcaacctccaggtcgccgtcgccaatgaagacaagggcactgcatcagatctggtcgggcggctcgacgcgggcaagcaggtcgtcagccagctcaagaagaacgaccggctcggctggacgttcgtcagcgccgacaaggccgtggaaggcgtgcagtccggcgaatactacgcggcgatcgtactgccgaaagacttcagcgaaagcctgatcaattcgatcaccggctcttccgacaagccgaacatcatctactacgtcaacgagaaaaagaacgccatcgcgccgaaaatcaccgatacgggcgccacgaccatcgactcccagatcaacgcgacattcgtctccaccgtcagcaagacactcgtccaaacgatgacgaaggagggcggcaagctcagccagtccgccgacggcacgcgcaccagcgtcgtcaacgacctcaatggcctcatcgagcagctgaacgacatcgactcatcgctcgggcgcatgggcggcacgttcgacgatgcggaaaagggcatcaaacaggccaagtccaccgtcgcctcgctgaaacgtcagatctcatccgcgcagaaagccgcgaaacagtcgcagagactgctcacgcaggtgcagggcagcgcccaatcgttctcgtcgtcgcttgcgggcgcgttcgacaacggatccgtgcagctgtccggcatcggcgtcagcgtgaacaacgcggcgggagacgcgctcagcgccttcaacaccgcacaaggcagcatcgacgacatcaccaatgctctgcagaagccgatcgacggcgcggctacgctgtccagcgacctcaaggacgcgatgaacaaggccggcatcggccgcgacaccgccatcggcaagcagatctggcagcagatagacgcgctcgacaagaccgtgaacacccagcagggccaactcgacgccttccacaaggacacgtcacagttcatcagctccggcaagagcgcggccaccagcctttcggacgtcaccagcaccgccaccggcagcggcatcggcatactcaaccgcgcacgcacgacgctcaccggaaccgtcaccccgaacctgaccgcgggattgagcaacttcgccacgctcagcggcacaatcgacggcacgctgtcatcgctgtcatccacgctcggccagtccgacagcctgtttgacgagctgtccgacacgctgagccaggcgaaaaccaccgtggccggcacgcagaaatcgctcgccgacctcaccgacagcgtcagcggcgtgcgcaccgacatcgccgcgctcggcagttcggccacataccagaaaatcaagcaggccctgaacatcgacggcgacagcttcggcgaattcatgggcacaccggtcgaactgtccaccaaaagcgtctacccgatggacaactacggctccgcggtcaccccgttctacacgaacctggcgctgtgggtcggcggcttcgtgctcatcgccatctacaagctagaggtcgaccgcgagcggctcggcgacgtgaccgcgtcgcaggcgtatctcgggcggtggctgctgttcgtggtcgtcggattcctccaggccctgatcgtcatgatcggcgatctggtgctcggcatccaatgccagcgtccggtgctgttcgtcctcgccggtctgttctgctcgttcgtgtacatcaacatcatctatgcgctcgcggtcgcgttccggcatatcggcaaggcggtcgccgtgatactggtgatcgtccagattccgggcgcgtcgggcctgtacccgattgagatgatgccggacttcttccgggagctgcacccgtggctgccgttcacgtacggcatcaacgcgatgcgtggcccgatagcgggactctacggcaaccattactggagcgacatgctgcatctgttcctgtacctgcccgtcgcgctgttcatcgggctggtcgtgcgccggtacgcgctgaacctgaacgcgctgttcgaccggcggctggccgagaccgacctgatgatgaccgagcacaacgcgatggtcaacgagtcggtgagcttctcttcgatcctgaacgagttctcgaacaccgaagagcttcgcaaggtgatccgccgtcgcgcgaaacggttcttcgggcgctatccgcggctgatccgcgccgggctggccctgctgatcgtgctgccgttcgtgttcctcatcctgctgttcgtcatcccaaacaaggtggcgatgctgacgacgtggatcctgtcgataatcatcatcgatgccttcctgatcgtggtcgaatacatgcgggaccggtacgcgcggcagctgggcgtcagcgccatgagcgcggacgcgttccgcgacgccgtgctgcgtggatacacgcaccggcacctgacgttccgcacgtccgggaggtcgccgcgcaggcatgcggccgtctccaaggcggctcgggacgacggtgatgccggggccgccggcgacggtgacatcgtggagctcggtgaactcgacggccttgactggccggcgcaaccgatttcaggcaatgacgatgccgagggcggcaataacggcaatgaggagagcgtcggggagaccaccgagcagataccgcccgcagggcagatgccgttcgccgggcaggaggacgagacgcgatgaaaaacatctggaggatcttcacgcgcgacgtctgccacgccacgcgcaatgtcatcgcgatcatcgtggccatgggactgatcatcgtgccggcgctgtacgcctggtacaacatcgccgccagctgggacccgtacggcaacaccaaatcgttgaaagtggccgtggcgaacgtcgacagcggatacaaatccgacctgatcccggtgcgtgtcaacatcggcgagaccgtcgtcagctcgctgcgcgccaaccatgacctcgactggcagttcgtcgaccgcgacaccgcgatcgacggcgtgcattctggcgaatactacgcggcgctgatcatccccaagcagttcagcgccgacatgatgacgctgttctcgccggaaatgaagcacgccgaactggagtactacctcaacgagaaaatcaacccgatcgcgccgcacatcactgatcagggcgcgtccacggtcgccacgaccatcgaccagaccttcgcgaagaccctcgcgcaggtcgccctcgacctggtatccagcctgctgaaattcgcgcaaagcccgcaaatgagcgagtacgtatccaacgccacgaaacacatttcgtcgatttcgtcgcagctgaagtccgccgcgtcacaggccgactcctacgcaagcctgatgggcgcgacaggcaaaatcatcagctccaccgaccgtctgctcggctcgaccggatccagcgcgtcggacgcgaagaaagcgctgaaacagggcacggccggcgtgaaaagcctggacgaggccctagccggcgtctcgacgagcatgagctcgtcgctgtccgacgccgcgggagcctacgacacgatcagcaagcaggtggacaccgcgttctccgacatgggctcccaatcctcccagattaccgacaagctcaccacgctgcagcgcaacatccaatcgcaggccgacacattcggcacatacgcggaggcgctgcgctcgctggccgacgccgcgcacctgcaggcggtcaaggacgcgctcaacaacgcggctcagcaggcgcagaacacgcagaacgagctgcagaaggtcgccgacagcatcggcgacgcctccaagaaaatcaccgacggcaccgccagtgcggacgacacgcgcaaatccctgaagaagcagatagccgccgcgaagcagtcgatcaccgacatggcgaacacgtacgacaccacgatcaagccgcagctcgacgaactgggcaagtcgatgagcgatgtcgtcaagcagtcggggagcgtcatcgacggactggccgccaccgccaccagcatgtccggcctgtccggcgacatcaccggcagcctgtccgacgtgcaatcctcgttgggcgacgcggcgaccaccctgaacgcctcggccgagaaactcgactcgctcaacaagcagctgacggcggtcgtcggaggcggcggcatgcccgatctctcgcagatcacgtcagccgaccccgattcgatcgccacgctgctgtccgccccggtctcggtgaaccgcatcgcgctgtacccggtcgccaactatggttccgccatgacgccgttctataccgtgctgtcgatctgggtgggcgcgatcatcctcgtcgccatgatgaaggtgtcggtgtccgaccgcgagaaggcgaaggtgctcggcctcggcgaaacgctgccgatgggcgagacgatgggcgtgaaggaggccgtgatcgccggacggaccgcagggccgggcgcgatgctcgacgtgctgcgcaagccacgccccgagtcgcccggcaacgcgcgacggttcggcctgcacccgtatcaggagtatttcgggcgatacgccattttcggcgcgatggcgctgctgcagggcacgctggtatgcctgggcgacatgttcttcctcggcgtgcaatgcgagcatccgctgcagttcctgatggtcggctggctgtgcgcgctggtgttctcgctgctgatctacacgctgaccgtgtcgttcggcgacatcggcaaggccatcgccgtggtgctgctggtcatgcaggtggccggctcgggcggtaccttcccgatcgagacgttgccgccgttcttccagacgatctgcaagtggctgttgttcccgtacggggtcgatgcgatgcattcggcgatggcggggtcgttcggcaacgaatactgggtgtcgatgggcaagctggcgctgttcatcctgccggcgctgctactcggcctggtgctgcgcaagccggtgatgcggctgaatgattggatcatccgcaatctcgaatccaccaaggtcatgtgacgtgagtcggcgggcgagcggtaggctggccgcgcgggtgcggcggccggtagccgccggttgccggccgtccggccgcccggccgtgacgccggccgaagccggtcgtttcccccgcccgtcgccggcgtgaaaggcggtacagtggaggctatgcaagtgaagcttatcgacgagaaccgctatgcagacgagatgcgcgagacggtgctgcccgcgctcgccacatgccggtccgaaggctggatggcaccggcggacgacgacggtctgccgccgctgcagcgtgcgggcaaactgcattacgtgtgttacgacgcggcgaaattcgaccggttgggcgaggacggcgccgccgccacattccgcggtgccgtggtgatctcccacgggttcacggagttcgccgcgaaatatgcggagatggtgtggtacttcctgctcgcagggtactcggtgtgcgtgttcgagcaccgcggacatgggtattccgcgcgtgacgtcgacaattcgtccctggtgtggattgatgattggcggcggtatgtggccgatctggcgaaattcgcggagacggtgggcaaggattacgcggatggccgtccgctgaacctgtactgccattcgatgggcggcggcatcggggcgagtgtgctggagacgcatccgacgctgttcgacaaggccgtgctgtcgtgcccgatgatcgcgccggtgaccggtatgccgaactggctggcgtcggtgcttgccgccgcgatgtgccggctcgggctgggacggcacatggtgttcgggcagagtgagttcacgccggagctggatatggccgattacgagggcgcgagcgaggcccgcgtgcgctggttccaacagcagcgcatcgacgacccgcatcagcggacgttcgcggcgacattcgcgtgggtgcggcaggcgctgcgactgtcgcgtgccgtgcagcggccggaggcgtgcgacaatgtcgagacgccggtgctgctgttccaggccgggcgcgacgtgtgggtgctcaacgagccgcagaaccggttcgcgcaggaggtcaactccgatggagggaatgtgcgcgtggtacgcatcgagaactcgctgcatgagattttcagcatgcccaatgccgttcttgggccgtatctggagcggattctgggcttcttcggctcatctgagatgccgacgttctgatggtttgtgacggatgccgaccggatgagtccgcaatgaaagatgccgtgaaacatgccgtgaaacatatcgtgaaacagtcgaaaacgccggccgccgagtcggcgcccgagactgcatcattcgagcgtacgccgaaagccatgctgctgggcgccgtgctggtgctgcttggcggtgtgctgtggggcatcaacgccacagtgtcgaaattgctgatggccgactatcacgccgacccgctgtggatcgcctgcgtgcgcgagctcgcggccggcgcgttgttcctggcctgtgccggtgtgcgtacgccgaaactattggcaggtgcggtgcgcgaccgacgctcctacccgatgctgctgttcgccgcgctgacctgcgtgctgttcgtgcaggtctcgtatctgtccgcgatcgactggacgaactccggcaccgcgaccgtattgcagacgttgaacctgctgttcgtgctggcgtatgtgtgcatacgcgggcgccgctggccggggctgcgcgagagcatcggcgtggcgttggcgtttgccggtacggtgctgatcgccaccggaggagatctttccatgctgaagctgccactggtcggattgctatggggcctcgccgacgcggcgtgtacggcggcgctgtcgattctgccggccaagctggtagcgcgatggggcaatcttgctgtcaacggcatcatgttcgtcatatccggtttggtgctgacgccgttcgtccgcccgtgggccagcgcgccgcagctggattggttcggcatgctgctgatggtgttcaccgttgtcggaggcacgttcggcgcatattggctgttcctggccggcgtgatgcgtatcggctcgatgcgcggcacaatgctgggtaccagcgagccgatcgccgcgacgatatccgccgtgctgtgggccggtgcggtgttcacgcccacggatttcgtcggcttcgtgatgatcattgtcatggtgttcctcgtgcgctagcacgcgtggcccgcatgccgacatacggtctctctcgcgtgcgacgcgcttcaccgactgtttgcgttcttaagtgcgcgccgagacgacaagtccgcgcacataggaacgtaaacagggcgatttgcgttcctacgtgcgcatggtcgtcgttttggcgcgcacttaagaacgcaaaaccacgtttcgcccgccaggccaggcgtcgcgggatgtgtggatagtgataggtgagcatccgaatgcatagaacgggggctgccatgcatgagtcatcgtataaggccggttcggggcgacgttatcagtccgggcaggggcgtccgggtcgcgttccgcggatcctcgtcactgttgtcgccgtaatcgcgctcatcgtgggcggcctcgcactggttcgggccgtcgcaccccatgcaatcgcgaagctgacagcggtatccgtgcgcagcctggcaatcggcgcggcggcgctgatcgtcgtcgccatcatactgatcgtcatggctcgcgtggcttcccgacgcggcaaccgagtgagcgtgcgcggaaccgcaggcggagccatcgtcgccgtcgtattcgccatcatgctgaccgtagccgcgctgctgatctccaacctgttcaaggacggcatcgtcaagccgtcatcgcccgacaagtcacctgctcagagtgcgcagaacatgcaacaatcagttgaggaggctggcatctactgcgagtccggctggtcggaactctcatcgcaagggtatccgggtgtgacggacgtcgagatatgcctcaagccgcgcatcgcctacgtcacgttcgataacgaattcgctgccgacatgtaccgcgcgcctttgcgatacaaaatcatcgagatgtttgacgagcaagcgaacagcaccatctccaagggagactggcggctgttgagtggcaagaaatggtcggtgttcagctacaggaccatcattgacaagctccagaagcagtggggtggaaccgtcgagaaaatagaatgacggcggatgatccgggtgcgatgcaaccgcggcacatgaggcgcggacgcggttctccgcgaaggctatgatggaaacgtgaatgacgtctcgaatcagccggcagcgaagaccccagccgaatcatcctccgagtccaccgaatcctcccgtttcacacgcggagacagcacgctgaccaccgtaggacggatcgtcatggtctacgcggtcgtccagctgctgatggcgatcagtgcgctcgcgtcactgtccggccttgatcccgcggcttccgtgcaagtgatcggcgggtggcgcatcggcctgcgcgtggcatggttcacgctcggcctggtgttcgcgggcaattgcgtgctgtatctgctcggcggatggctcggccgccgggccggagcggacacgtccaaatcccggccgttcatggcactgatgtggctttccgtggtgaccacgcttatcggtctgctcgccgcgcgggcgaccacatccggctgggaggcgtggttttcgcttctgatcgccgtgatactttccctatacgcgaccaaagtcgtaaagcgcagcgcgcgcatctgagcggtgacatcggcggctggcctacagacgagcgaaacgccgccaatcgacggtgctgtgagtgaacgcaacgcaaagaaaaatcaggtatggtgagacgcatgagcgagcagaacaatcacgatacaacaaacaactcccggcgcaacccggccgcggcggacggcccgtccatgcagacggcctatttcgcgggcggatgcttttgggggctggaacgctacttccagaacgtcgacggtgtcaccgacaccacggtcggttacgcgcagtcgaaggtcgaatcaccctcctatgagcaggtgtgtgcgggcgtcaccgacgccgcggagaccgtgaaagttgtgttcgacccagcgcaggtgacgctgcgcacgctcacactgctgttcctggaggtcattgacccgttctcggtggaccgtcagggcgaggacagtgggcggcagtaccgcaccggcatgttcttcacggacgcgacgcagcaatccgtgtatatcgccgcgctggagcagctggtcgatcggcagcccgcccgcccggcggtcttggtcgagccgctgcgcaacttctacccggccgaggcgcaccatcaggattatctgatcgccaatccgggaggcttctgccatattccgctggccgccatcgcgaacgtgaaacggcggcagaagtatgtggaaaagatctgggacctgacgctcgaacagttcgcggtcacgcagtgcgcggccaccgagcggccgttcgtcaacgcctacgacgaggagttcgagccgggcatctacgtggatgtggtcagcggcgagccgttgttctcatcgcgcgacaaattcgattccggctgcggttggccggcgttctccaagccgatcgcggacgagctgttgaccgagcacgcggatcatcgcatcccggggcgcgaccgcatcgaggtgcggacggccgacacgcagatccacctcgggcacgtgtttgacgatgggccagccaaccggggcggtttgcggtactgcatgaactccgccgcgctgcgcttcgtgccgcgctcgcgcatggaggcggaaggctacggcgactggttgcctgcggtggatggcgaatagccgttcagagagccgttgcgcgccttttcctccgcgccagccatcgccgccattggccatggactagcgcaacggtcgcgatgagactggccgccgcagccaatcccagagaatacacgaatcccggagtgctgaagccgtgggcgatcaccagggcgttggaaccgatgcagatcgccgcgaacgaggcgagcgtcgcgatacgcagccatggcacccagcgcgccgggattcttgcgacggcgagatacaacgatgcgataacgacgacttgcaggcatgatgcagcgacgaattgccacagcatcgccggatcatgcagaaatgcggtttcggggaacattctgatgatttcgcggatggtgttcggcaggcgccaccatttgagccatactagccaagcgtccactgccactgcgatgccccacgccaatcctgtgcgcaggcgcagctgtggcgacgcgcgtcggatgctgctcttggcgatgagcgtagattctctcatcgtcggctccttcgaaggcgaatcaggtatatcgcacattgtgaaggcgcggttgccgcgaatcgccgccaaacctcatacgaacgggcagacttttcgcgggaaggggcagccatctgcgtttcagggggttgatttcgtgttcgccaaacgtctatctacgtttcgaggggttgccaaaacgcgatgcccggggtattgagcgccaatcgccattggaatcatgcggttttgggggtgcttatacttggccaccaacccctcgaaacgcagatagatgttcggatcaaaccgaatcgccccctcgaaacgcagatagccttctgacagcgcttatctgcgcaatctctcacccgacaaggtgccggtacagctcaggatccagcggccgcgcaagtctcagtgtggagagcgtgaccttcaccgtaccgtttccggccgcgttcggcttggtggtgagcgtcggattgtcaaacgcggcgacgtgcccgacgtaatagtatttgccgtcggcctcttccgccttgcgcatgacgaacagcggaacgaaatgcgtacggccccagtccggtcccacaccgctcagcgcccactggaattcgggagattgcggggtgcgcccgttcttgctgaagtacttcatctcctgtgcgttcaggaactcgtcttcgtattggctggccgcgtacttcacgaagatgggcatggtgttggtgtctttgtcgagcaggtacccgcctacgttctgaggcgtgttctccttcttccatccgcacagccgcatgacgtcggccatggagtatttgcgctcatacaggaacgcatggtcgaaagcgcgtcgccggctctgcgcctcctggaacaggtctcggcaattggccagaccggtgcgcagcgtgtctgcgagaaagatgcgaaacgtgcgattttcggcgagcatgttgacgaagccggagcttaaacgataggccggttcgccctgatcatcgtcggccagcgtctccaccagtggcaggttcccgaaacgtttgcgattcggtccggtgaagtatgagtagtcaagcacgctgatagcggagtcgaactgcgcatccgagagatcagcctgtgggaagtccgcacggatcgcatcaagcagcgcatctcgactgattggcgcggatgcgttccagctgacaggagtctcgtcatccaggcgctcttcggcaagccgacacagccgttcgaggatggccaactcatgagggcgcagcccgggcagcagtaattccgtggccatcttgaggaccgcgtcttcggtgtcggttaccgggtccagctgatcctcaaatgttgtctcgtggttcttgccgccgccgaggctcttctcgcgcgatcgcacgaaatcgaggtagttgctgcgcttcgtggccaatgtatacggcaaggaaggatcgtaggcgtagatatccatgagcatcggaatgcggccgagctcgtatcgcacctgccggtattgttccgatagcttcttcatttcggaccagttggcggtgtccagtgatttcagcacgcgttccttggcgatcgggtcgaagcttatggaggacaacccgatcgatttgcgctgcaggttcttgcgcgcgcggtcgcggtcaccggtgttgccgtacagggccacggggatcaggtagttgttgttgtagttgccgataaaatcgatgaccacgacgctgtccttgtacgggaacttgcgcagtccgcggccaagctgctgggtgaatatgatgctggactctgtgctgcgcagcatcacgatctggttgacggcggggatatcgacgccttcgttgaacatgtcgacggtgaacaggtagtcgagttcgccgtcggtgagctgccggacgtattcgtcgcgtttttcctgcgataacggcttgccgttgacgtctttgctggtcaccgctgccgtgcgataggggcgttccgcttgctggttccaatgctcgttgaacaagcgggacagctcgtgcgcctcctcctgcctgctgcagaacaccagcccggtgacggggatcccgaattgcccgtattcctgcagcttgtcgatgatatagcgcacgcgctgctcggtggcgagctgcccgatctcgtatttgagctgtttcgactccttcgcgtcgagcccctgtgaaacatcgaggcggtgcatgtcctggtccgggtcctcgtcggaaccgagatattctgcgacgccgtaataatggaacgggcagagcatgttttcgtccagagccttctgtagccggatctcataggcgatgttgtggccgaacaactcgaagatgttgatgccatcggtgcgttccggtgtggcggtcatgcccagcatgaagtcggcgtccctgaaatggtcgatgacgcgctgatacccttcggcgcccgcatgatgaacttcgtcgacaagaacgtagtcgaactcgtcagaggcgaattgcgccagggcctccggctgacgcatggtctgcaccgtggcgaacacgtagcgccgatcctgttgtttgctggtgccggtatacagtcccagctcggattgcggacaaccgagcaccttctggtaggatttcatcgccgctttgaggatcatttgctgctgggcgatgtacagcatgcgccggggccggtactcacgcacgtcgaacgcggaaagataggttttgcctgttcccgtggccgacacgatgatcgcacgatgctcccctttctcgcgtagtttcttcaggctcgcgagggcttctttctgcatggcgttcggctggatctcacggccttcgagggacttcagaatgtcgcgccgtggcggcgcgtacttcttgaaatcctcctcatactgtttgatccattcctcggtgagcggcttggaatcggcgatctgtgagtcgatttcatctcgcacctgcgcgaccagttcgccattggcgagggatgagaccttgagattccattcgcgttgagtgttcaatgcggcgccggtaagattcgaactgccgacgaacaggtcgtagtacggggtgccgttgcgcatgcggcgcgagaatacgtatcctttgggatggaacggctgcccttgagcgactgatactgaagagtcggagcctgcccacacgcggacgtccacgcctgccgtccgctgtaggtgaagcagttcccagaaagcgcgtgggtcgttgaaatgattcttcgtcgacgtgatcagtctgctgacctgctcgggcgcattggcatgatgactgcggaagtcctcgaacaaactgagtatggcatcaggagagacgaaggcgacggagatgtcgaaggaatcgctgttcgtgagcgcatcgctgattccatcatgcatggtgaggtcgcctgggcggttcgaaatcagcgttggcttatagctttcgggggcgtcctgccggggttcgatcagtccggagatgacgctttccagcacggaatgcgtggcatcggttttgaggtctgactgcgggttgagtgattctcgcgtattcatggccggctcggttcctcggaggtgtccgacgttgtctgggtgaggaagcgcatgcctgcgatgatgccgacggccgtacggtcgaccggagcccaattcagctgtggcattgcggaaggatccagccaacggatgtccgtgtgctcggtcagccgtggcatgccgttgattaggtgacaaatgaatgtgatgagtcggaccgtgccgaagtcgtaggcgtactcgctggtgcacacctcatcggcgacctcgatctcacagagcagttcttcttcgatctcccgatgcaatgcctgacgagccgtctcgtaaggctctattttcccgccggggaattcccaatatccggcgagagattttcccggtccgcgttgcgcgcataacaccgctccatcgcgtacgatcgccgcacccacaacgttgatgatcttggcatgagagtccatggttacccgggatacaacggcggcgtttgataatgcgattgtgcggacgggtgtcatgagtggcatgtgaagtgattgcaattgctgtcggaagtttcagctactgaaagtttgacacaaaccgctcggcaaataccaccaccagcaggtatgaccgcggcgccgcggttggaggtcggctgcccgcgatccttcagcgagacgccagcacaaccgtcaccatggcagctgcgccgcgttgctgtcggacgaaggggccgcaagattcgcgtcgctcgtgtagctcgtgcccggctccggtgcgacggtctcatgcggatccggaatcgctgcggctgcgctggctgtgctcgcgcccgtgctcgcgcccgtgctcgcgcccgcgtcaccttccagtcctctggccacctcatcgagaaaatcgtcgacttcgtcgatgtcgtatccctctctgaaacgcacattgctgaaggtcttctccttgatgcgccttgcgagcgagtggtcgccggtcgccatgcggtcgacgatttcgtcaaggaagtcgtcgacctctctggcgctatacccttccttgaaccgcactgtggtgaacgttctcgatgtgatggcgtctgcgctgatcatgactgatcctgtctgtcgctggatatctcgcgcttccactctactctcgcctcgcttgttggaattgcgattatggaagcagcattgaagcccgccgcgccctctgccgtcacggtggtgatcaccagctgcaatcagggagcgctcatccgtgaagcagtcgaatctgcgcttgccgaattcggtgcgccaggacgcgacggtaccgctcctgccggtcagtttgcgccggtccttgaaaaatcatccctatatcaattcccgtcctgcccacctacaggacgggacgattcacctgctcggcgctagactgaagatgtcaatcgtagtcaaaccaaaggcggtcatatcatgattctcgtcaccaccacgccgtcggtcgacggttacgtcatcaatagctatcagggcatcgtgttcggtgaagtgatttccggcgtcaacatgttcaaggatatcggcgccggcctgcgcaacatgttcggcggacgcagccagggctatgaagaggagctgatgaaggcgcgcaacgaggcgattcttgagatgcagcagcgggccgaggcaatgggtgcgcacgccgtggtcggtgtggacatcgactacgaggtgcttggcgccgacaacggcatgctgatggtcaccgcgtccggcaccgccgtgcaactcgcccgccgcggctgaactgtgccggcaccagcttgtgtgccggcaccggcgttcggcgaaacatcgcacggcgacggtatcgtaaagcgttgcgccgcgaagcgcgacggatgataccggtggaaaggaccgtgtgatgactcaaccgcaggcatatgcagtgaccgagggtgacgggttgcccgtggtgttcgtgcatggcatgggcgtggaccaccgttcgctgatgctgctggatgaggcattcttgtgcccggagtcgggcgctgccgcgtcgcggtcgctgaagcgcatatatctggatttgccggggttcggccgcactccggcactgccggcacgcgcgtgcggtctgccggagatggccgactggctgcagtccgccatcgacgatctggtcggcgcgggggagccgttcgcgctggtcggcaattcgatgggcggtgcactcgcccgtgagatggtggctcgcgagtcatcgcgggttcgcgggctggcattgatcgccccggtggtggatccgcggcgcactcgtcgtcatgtcgccgagcatgtgatcgccgagccgaatccgacgctgatacacgcgctgcctcaggatcagacgttcgatttcgtaaccatgggcgtcaaccagtcattcgccgcgtggcgccgctatcagtcatatattttgccgggcatccgtctgtgcgaccgtgacgcctgcgccagattggacgcccgttattggctgaatgacgacccggagcgcgtattcggcacttatgccgggccgactctgttcgtcaccggacgacgggatcagatcgttggttttgaagatcaacgggccctgttgtcgcattatcccgacgccacgttcgtcacgctggatgatgccggccacaacgcgcacatcgaccagcccggagcggtgattcgtctgctccgggagtgggccggccggctgtgacggtaggcgtccacgcgatgtcgggcgcggcacgacgtatgacacgcgctacactggcgcccatgaccggtaaaatcgaagcctacgaccatctgcctgaaacggctcgtgcgatacgcgagcaggtgttcatccgcgagcgtgactggcggcctgaattcgacgagtgggatgccgtggccgtgcatctgctggcgttcgacgggaatcggaccgtggcgacatgccgattctatgcggatcccgaccattccgatcagccgggaaggtacgtgatcgcgcgtctcgccgtgctgcccgacgcgcaaggccgcggtatcggctcccaactgctggccgacgccgaacgccgtattgcgcacagtggaggaaccatcgccgcggtacattcggagaacgaccactacaagttctacgagcggcgtggatatcaactcaccgacgaactctacgacgacggccgccacggttggttgatcaaggcgctcatatgatgcaacttacgggttgaaatagccgaaatccgtgattccccgtgcgaaatcgccgttttcgggcccgaaaacggcatttttgcacggggaattgcccagaacggcgatttcaacccgtaatttacgggagcgagtgggggctctttgtagtaatggccggttatcacgtgatccgattgatctcgcaatcagttggtttcgcgcgacgacaacggcgacgacggaggacccggacacggcaccggggccgaccgggacgaatcccacacccacgtcaaacgggaccaaaccgaccagaaaccaaagtctaaaacaccacgtctagtccctaaaacccggtatccggcatatatgagaaaccccggagcgttggcgttccaacgttttccggggattctccatacgtgcgagtggggggagttgaacccccacgagcatacactcactgccacctgaagacagcgcgtctaccattccgccacactcgcagacaaagagataacttaccagcgatacgtggataatgcaattcggcgtgtcgcggtggggcgccgtaatgattgtcgcggcgggtgctgcggtgattgttgcggtgacgcccgccgcaagcacccgtcgcagcgctccctcacctcacccgcgcggcccgttcgcatagaagcgggcaagcgactcgtcgcggaattcgtcgaagtaaccgccgtcaatcgaggcacgaatatcgtccagcagctttacgaagaaacgctcgttgtggatcgtcgccagcgtgaacccattgaattcgcgggcgcgcagcaagtggtccacatatgcgcgcgtgtaatgctggcacgtgtagcagtcgcacccctcctcaagcgggccgaaatcgaacttgtgctgggcacgcttgacgttgtagcgcccgtcgcgcgtgaaaatcgccccgttgcgcgcgcaccttgcgggtgcaacgcaatcgaacgtgtcgccgccattctccacacatgcgaagatgtcgtcgaccgaggcgatgcccagcacgtgccgtggccggctttccggcatcgcgtcgcagatccacgcgcacgtgtctgcgatgatacgcttctcgatcgcgccgccgatgcccacgccgtcgaagtccagcgaggcgatctgctcggccgcatgcctgcgcaggtcctcatagttcgcgccctgcaccacgccgtacagtgcctggtacggtttgcccagccgctcctcggtcagccgctggtgctcggccacgcaacgctgcgcccaacggtaggtgcgttccaccgaggcttcctgatacgagcgcgtgttcatcagcgtcgtcaattcgtcgaacgcgaacatgatgtccgcgccgattttatgctggatgcccatcgagatttccgcggagaaacgatgacggtcgccgttgagcggcgatttgaatgtcaccccatcctcgtcgacgaacgccagtcgttccttgcccgccgcgatcacgtcgtccgatttcatgccggtcacgtccatcgccagcgtcttcttgaatccggctcccagcgacagcacctggaatccgccggaatcggtgaacgtcggcccgtcccagttcatgaatcgcgcgagtccgccggccgcgtcgagcacatcctggccagggcgctcgaacagatgaaacgcgttggacagcagacattgcgcccccagctcgcgcatggtctccggcaggacggccttcattgccgcctgcgtggcgaccggcacgaaggccggtgtgcggatgtcgccgtgcggcgtgtggatgatgccggtgccgccgtaacggcggccgccacggcctttgccgtcagctgaatcgggcagttgcgtaagggtttcgaaaaagaatgcgctgcggtcgccgggcctgccatcggccgcgccgcgcgggtgctccagaaaactcgtcatacgattactctaggcgatggccgggaaggcgggagatggcgctcggaaagcctgctgcgggctttcccggcggttcgtggcgtatcgttgtctcaagctgtccggctgatgcgtccgcttttcggacgggatatccgcgggtttcagaagaatcgttttgctgctgaccggtcggaaatgtcgtacgaaacaaggccgaaggcctgcttcatgataacggtagataattcattctctccttccaatcaacgttcaggaaacatccagagcaggtatctttactcttacgtagagcttggcggcgcgctggctcacagatacgagccccaacccgcctgctgatacttacgaatattgaaggagacaacatggctgacaacaacaacggatactggcccgccgataacggcggccagcctgagcagccgcagaacgacaacctgcagcaggacgctccgacgacctcggatgcgcaggatcagcaattcgcccaggagccgctgggcgcgcctcaggaagcgcccgcgcagaacgacgacgcgcagcagccgcagcccgaagcgcaggatacccgtccgacccagccgttggcgcctgtcgcgccgacctcagagcaggcccaggcttccgaaccgactcagccgctgccgccgcagccgacgcagccgacgcagccgctgtaccgcccggcaccggaatacggcgcctacggcccgactccgactcagccggagccccagcagccgcagccgacccagcagcagaatcagaacacgggcaacggcggcaacccattctttaacggcaacccgttcatgacgcgcccgacggacgacgcctcacagcagaatcgccagaacggcaacacgccctacggtttcccgttcggcccgcaaggcccgaacggcggccaggatcagggcatggctcagccggaagacggcggcaacgcgtcgcgcggcgggagctccgcggccagccacatcgtgatcgcagtggtggccgccctggtggccgcggcgctgtgcctcggcgttggatacttcgcgctcacctatggttgggtgagcacgccgacgacgacatcgctgaccaacgtccagtcgaacaagtccggtaccggcagcgccaccgccaagacgggcgaggccgccgactggaagaccgtggcgagcgaggtctccggctccgtcgtgtcgattcaggcggcgctgagcaacggcaccgccaaggggtcgggcgcgatcgtgagcgccaagggctacatcgtcaccaacaaccacgtgatctccggcgcccagcagattcaggtgacgctgtccaacgggcagatgtacaccgctcaggtggtcggcaccgacaccaccaccgacctggcggtcatcaagctcgacaacccgccgagcgacctgaaggctgtggaattcgccgactccgacaagctcgccgtcggcgaggacgtcatggccatcggcaacccgctgggctatgacgacaccgccaccaccggcatcgtgtccgcgctgaaccgtccggtcaccgtgaccgatgactccggctccgacatcgtcaccaacgcggtgcagatcgacgcggccatcaaccccggcaactcgggcggcccgacgttcaacgccgccggccaggtgattggcatcaactcgtcgatcgcctccaccgcgacctccagtgattccgccggctccatcggcatcggcttcgcgattccgtcgaacctcgtcaagcgcgtggccaacgagatcatcaaggacggcaaggtcaagcacgtggccctcggcgtgacaatcaccaccggcacggtcgaggcggacggcgtgacccgcgccggcgccaaggtcaccgcgggaacctccggctccgccgtggtgtccggcagccccgccgacaaggccggcctgaaggtgggcgacgtcatcgtggcgtacgacggcaacgcggtgagcagcacgtattcgctgctcggctatgtacgtgcgtcggcgcttaacgacaaggtgacgttgaccatcgtgcgcggcggcaagaccatggacgtcgaggtgacgctcgacaaggaggagtccgcggtgaacggctccggcagctcgaactcgaacaacaaccagaacaaccagaacaaccagaatggcaacggccagaacggtaacggcaatggcaacggcaacagcaacaatggcaacagcaacaacggcaacggcaatgacagcaacgggtacggcaacaacgactacggcaacggcgggttctccgatccgttcggcctgtggtaagttccgctcccgaagccgctgacgctgcctgacggctgacattgcccggcagttgacatggctcgatgatggaggggccggtgcgcttgcgccggtccctccacttgtgtctgcggccatgttcccgcgtgacgctggcgtgtcctttcgcagttgttgctagagttggtcggagccgcggatggcatgtgccgccgcgcaacataatcgaacgaacaattgaatatcgaataatctttttacgccgtgtatcgcctgccctcgccgttttaggcagtgctgccgatgggttaacaaggcgtgggtcgcatgccgttcgtgattccgcgcttgttgctgggatgacggacggtccgtatacgagcgtaaggagatacgatgcgtaagttcatctatctttgcagtcatctgtgtgttcaagtgccgctgttgccgattgccgtgctcacggtcattccgcttgccgtgtgcccgtcatggcgcccgtggggagcggcggatattcctgtactgggcaatcccggcgtgggccagtggattgtcatcatcgtggtggcgtacacgatcatcgacaccgtgcgcggcatgatcgacgatttgcggcatggtcgggtcggtgtggatctgctggctgtcgtggcgatcgccgccacggtcgccgtgcaggaatactgggcgagctgggccgtggtgctgatgatctcgtccggcgaagccatcgaggaatacgcccaatccaaggccgaaagcagcctgaccgcgctgatgacggccgcgccccagaccgcgcacgtcgtgcgacggcccggcgtgggcgtcgctggtgtcaacaccggcgacggcagcgacggcagctccgacgaccggtgcgacggcttccgcaaggtcgccgctctgccgtcttccgccgccagcgggtcgtccgacgctgcgacttcccactatgacaccgttgccgtggaatccgtcacccccggcgatgtgctgattgtgctgcccggtgaaaccgtgccggtggatggcgagctgttgtccggatccgccacgctcgacctgagcaacatcaacggtgagccggtgccgcgtggagtgttcgcgggcgcccgcgtcatgtccggcgcggtgaacggctcgaccacgctgaccatgcgtgccgccgaagccgcccgcgactcgcaataccagcgcatcctcgcgctcgtcgcggccgcgcaggattcccgcccggcggtggtgaagaccgccgatgtgctggcagtgccgttcacggtgctcgcactggcgatcgcggccgtggcatggttggtgtccggcgtgccgacgcgcttcgctcaggtgctggtgctggcgactccttgcccgttgctgatcgccgcccccgtcgcgtatgtggcgggaaccggccgactagccaagtcgggaatcctgatcaagacacaggacgtgctggagaacctcggccgcgtcacgcacgtgttcttcgacaagaccggcacgctgaccgtgaagcagccgcaggtgacccgcgtcgagatgctgcccggtgccggcactcacctcaatgaggaccacgtactgatgatggcgggcgtggtcgagacctattccgtgcacatcctcgctaaaggcatcgcgaaggccggcacagaagctctgtcccggctgcatcggcggttcgaggaggggcagcggctatgcccgcagcccgatgcggactggcctggtcacgggcgcgattatccggtcgtcaagcacattgatgaagacgccgggaaaggcatctccggcgaagtgaatgggcataaggtgcgcgtaggcagactgtctttcgcggcctcaagcgaagatgggttcctgccggttgagcggatcgtcccgggccgggctacgactgatggagaccggcagtccggaaaacaaggtgaggggcggcttgcggacgagatccgtacccgtttcggcatgctcgcgccggatgaaatggcctcgtacgtgtcggtcgacggtcatctcatcgcccggatcgtcctgcgtgacgtgccgcgcgcgaacgccaagtcggcgctcgcgcgcctgcgcggtctcggcgtcgccaagctgtccatgctgacgggagacaagcgatcctccgccgccatcatcgccagtgaggtcggcatcgacgatgtgcatgcggaattgttccccgaagataaggtcgccgctgtcacgaccgcgaccgtgacgccatcgcgcggcgtgacgatgatggtcggcgacggcgtgaacgacgcgcccgtgttggccgccgccgatatcggcatggccatgacggacggcacgtcgactgcggcctcggagtccgcgcaggtggtgatcatgaacgacgacatcgccgccgttccacgggccatcgccatcgcccgccgcaccaagcgtgtgatgctgcaagccgtgctggccggtctcgcgctggccctgatcggcatggttgcggcggcgttcaacttgattcccgtcgtggtcggcgcttttctgcaggaagccatcgacgtggtaagcatcctctgggcgctcaccgcgctgcttgaccgtgactgacgggccgtggtcgacgggcgcagctgggccggtcgtgatcgaccggccgcgcccgtcgccggacgatcgggcgagaacgaatgtgacattcgacaacaatgggggcaatgccgggaaatcccgccgttgcccccttccgtgattcggtggcttgcgataacctataacgcgtgactgaatctgagaacaatgaacttcgtatcgccgtgatcggcgccggtcccgccggcgtctactcctccgacatcttcctgcgccagctgaagaagctcggcgaggagctgggtctgggcaccaaggcccgcatcgacctgttcgagaagctgccggtcccgttcggcctggtccgttacggtgtggcccccgaccatccgagcatcaaattcatcgcatccgcgctggagaagacgctcgacaaccccgacatccacctctactgcgacgtggaattcggcaaggacgtgaccttggacgacctgctggcgcgttacgacgccgtgctgttcgccaccggcgccgtcaaggacaaaccgctgaacctgccgggcgccgacctcgacggcgtgtacggcgccgccaagttcgtcgaatggtatgacggataccccacgggtgcgcgcgaatggccactttcggccgagaacgtcgccgtgatcggtggcggcaacgtggcgatggacgtcgcgcgcgagctcatgcgcaacgccgacgacctcaaggccaagaccgacatccccgacaacgtctacgaaggcatccagggcaacaaggccaaggtgctgcatctgttcatccgccgtggcgtcgcccaggccaagttcagcgtgcaggaactgcgtgagatggagaagctgcccggcgtgcagctcatcatcaacgaggacgacttcgagctggatgacgacacgatcgaagaggccggcaaggacaagctgacgcgccagatggtcgaggagctgttcaccatccgcgagatggccgaagacatggaagacgacggcgacgtcgattacgagggcaaccccgcagatcgcaagtattacgtgcacttcaactccgctcccaccgagatcctcggcaaggacggcaaggtcgcgggcatccgcgtggagaagaccgagaccggcgccgacggcaagatgcaccgcgccggcgaattcgaagactacccggtcgaggccgtgtaccacgcaatcggctacaagcccgccgaagcgcccggcatcacctatgacgagaagggcgcccatctggccaacgcgaacggcgatggccgcatcaccaccgaggccgccggcggtgacgtgcgtgaacgcctgtatgccaccgggtgggccaagcgcgggccggtcggcctgatcggctccaccaagtccgacgcgttgatgatcgtcaccaacatgctggaagacctcgccaaggcggccgaaggcggccgtgtggccgtcgaccgcgaccccgagtccatcgaccgcctgctcgccgagcgcggtgtcaagccgattgacttcgccggttggaagaaggtcgacgccttcgaacgctccgagggcgcgaaggaaggccgcgagcacaagaaggtcgtcgagccggatcagatgcgtgagcttgctcacgcctgagcgacctgtagcgcgactcgtatacatcgatcaagccgcctcccgtgtgacattgtgggcggcggcttgtttttgcccgtacttgtatcatcccgtgcctccggaatcatttcattgtgctcaaggcgcatatccagccaactgtcagacagtgaatttagtgtgtgggctatggacggtaaattgcatgtgcgcggccacttcaacggcctgaaaacgacgctgctctttgcgttgatgtgggccatcgtcatgttgatctggtgggccaccggcggtggccgcggcacgctgggcgtatatatcgtcatcggtctggtctccacgttcagcacgtactggttctccgacaaactcgccatcgcctcgatgggcgcccgcgcggtcaccgagccggaagctcccgcactgtaccgcatcgtgcgcgaactcagcgccaaggccggcaagccgatgcctcgcatctacgtcgccccgaccatgagccccaacgcgttcgcaacgggccgcaacgagcgccatgcagccgtatgctgcacgcaaggcatcctcaacatactcaacgagcgcgagattcgcggcgtcctcggccacgagctcatgcacgtgtacaaccacgacatcctcacctccgccatagcctccgcactggcgaccatcatcacgtatctgggatactcgctcatgtatttcggcggcggtcgcagcaacgaccgtgacaactcctccggtgccttcggtctgatcggcgtgctggtgagcgcgattctcgtgccgatcggcgcctctctgatccagatggccatctcccgcacccgcgaattcgacgccgacgaggacggcagccgcctgaccggcgaccccgaagcgctcgcctccgccctgaacaagatctcctacggtgctcagaccaatccgatgccgaaaaccgcgggcacgcagtcggtgtcatccatgatgatcgccaacccgttctccgcgcgcggattctcgaagctgttctccacgcacccacctaccgacgagcgcatcagccggctcatgcagatgtcgcaggagatgcgcaattccggcatcggcggcggcagcagcccgcagtacttgtactagcttcgttgcgcaaggttcgcgggcatcgccgtcatgtgatacactgacgacttgtgcacaaagcactgcggatgtagttcatcggtagaacgaaagcttcccaagctttaaaggcgggttcgactcccgtcatccgctccacttccctcaacgataaggctttaaaacccaatcattccaacgattttcaattttgtaggcacttgcccaatcacacgatttttgtcgaattgttgtcaccgtgttgtcacgaggtgtgtaaaagaggattcggagagtggtttgggctcaagagttttcccgtggtcaatgtttctgctgcagtgatcttgctgctgatggatgttgccacgtaatcaagatcggtgtcgaataggtctgcataagtatcccttcttagcttggcttatgacaggatttttctctgaattcagtgctctttctctgaattcagagaaagaatgtataattcagagaaaaattcagagattcagagcaggcggtggcgaatggcgcacgagtatggcaaagaaaccctgtccaaggaattcaaaagcgatcgcgataaaggtctgccggattccgaattagtggaggctgttgtcgccttagccaatacggacggcgggtgcgtgtatctgggtgttgaggacgacggcaccgcgaccggtgtccagcgcaagcatcaagatcctgtcgggctgtcagcgatgattgccaataggactgtgcccccgatatcggttcgcgcgcaattggtgggtgatggcgtcaccgtcatccaagtcgatgtacccaagtcacatagtgtggtgtcaactaagtcggggagaatcctgcggcgcatgatgaaagtggacggtacgcccgaaagcgtacctatgtatccgtatgagatcgctacccggctttcggatctgggtaagctcgactactccgcccaaccggttccgggggccacgcgggaggatttcgatccgttggagcgcgaccgcctgcgcaagatcatctccacctaccgatccagcgaccgtaatcttctagagctttcagacgaggatctggaaaaatcattgcgtcttgtcgtatcggcggatgggaatgtaacgccgaccttgacaggtttgttgctcatcggcagtgaggagtcactgcaacgtcttgtcccgacaagcgaggcggctttccaagttctggtcggcaccgacatcaaggtgaacaatacatatcgcggcccgctgctcaagaccatagagcagatagcggagtcgttcgctccttggaatccaggaactgaactgaccgtgggtttgttttcctcggtggtgcccgaattcgacgagagggcgttcagggaagcgttggtcaatgcgttcggccacagggattactcagttcttggccgtgtgcgtgtgctggtggatgacgcgggactgacgattgccaatcctggaggattcgtggaaggcatcaacgttcacaatctgcttaccgcggaaccgcatggacgaaacccatgcctcatggatgcgttgaagcgaactgggctagccgagcgaaccggtcgtggaatcgatcgcattttcgagggggccttgaactatggtcggcccttgcctgactattcgagatccaacgggcggggtgtttcggtgctgctgcctcggagcgcgcccgacgaggcgtttgtggaattattagccgaggaacgcgagcgtagcggcaagtcaatgtcgcttgacggtctgcttattctggataagctcaagcgagagagacgttgtggctttgacgcgttgtcagagtccttggatatgagcgatcaacgtctgcgcactgtattggggcagttgacggagtctgggctcgtcgaaagctccggcactaacgctcgtcgtacatacacattgggggcgaaagtgtatcggcgcagcggtaaaacggtggaatatgtcagacagtcaggcatcgacagggtgcgttaccccgaattgatcatgaagctgatgcgcgagcagaagtcggtaagcaaaaacgacgtgatggagctattgcatctcgacgagaaccaggcatattaccaattgcgaaaactggttggtgagggacgcgccaaaaaggtgggtggtggtcgcaatgtacgatatgaggaaatgcaacgagacgacgatggaatatcgggcgaacagttctgattagggattatcccctgaatgcatagagctgggattcagcacagcaaagaggattttcatcgactcgttcgtcggtatgcaggaatcgccatggaattgttccatggcgattatccgttttctccggacgctcatcgtccagaccagtttcgctgattctgctccacgattgaagtgtgggcgatccttttgccctctactgatgccgttggaagggagccggcatgccgatatattcattccccgaaccacgctatatttcgggcgcgggctgttcccaatccattgatatgaatatggggttagcaagcgacgtatgtgtggccacacgtgctcgctccacaggtgcggggcggcttgccgggagacccggtccccatggtcggcgaggcctccagaccgctgacgtggcttatggaatgagccgttccagctcccgcggggaggtgtttctttatgggctggcgtgacaatcgcaggcgcagcgtatgcaggaaaatcatgttcacaccggaggaatgggagcagactaggaggatccacgagcgttgggcgaggaacatcccggtatacaggcggtggggtgatttcgcccgccagaccctcatgcatggcgcgttgatgaacgtttcggtgacgctggcgagcgatccggaggtgttcaaggccgagccccaccacatcggcgtgaacgtgaaccagacagcccattgcgctggcccgactggtggatcctgctcaccgccaccacgcacccggtctacctgctggcaatagcgccaaagatcagccggttcatcactggcggccagcgatgaatggcaagagcatggaggcatggcggtatctcggcatggcgcaaatgacgaattcttccataacgttcttcaggtccgggccagttgcttatagagcgtatgagcgtctgggtaaatcctgcagggcactccggcgacgttcgcttgacgctccatgatggggtcgtgcttgccatacagcagcagtttgccgggccttatcgcaaaaagcttctcggcgaagagcagatccagttcggattcggtgttcgcgcatcccaatgtgctggtggcgcacatcactccggaaggaacgcagctcaggcatgtgatggtgctgggggaaccgcatctgagattctgcacgattttgacgccgttcaccgccaatgtcgccagatagagctgattaagcagcatgattgcctgctgccattccaggtccatgtccgaagtgacggtgaggtccgagccgacggcacccatataccgcgagtattccgggatgtcgtcgagggccttctccagtcgcgggtatatccgcatgtcactggtgaacagacaaagcacggtatgggaaggattatggacgaatcgcgccttgcgatcccggtacggcaccatgagctccggccattcgtccagatacatctgcggctgaagcatcgggaaaccttgtggattgaactggatgcctttaccgctgagatagtcggcgtagcggtcgatgagctcttcgaatgatgcgatggatcggttcatgccgcccttcccacgttgggaaacttcatgacaaggacgtgcgcccccgggatttcgcatcgcagcaggcacagcacctggcgcaggcgatgctggtgaaactgctgcaccgcctggccttggaaccggggacggcaatcgtcgatcactgcgatttgacggcagccggccagggacgccctgacccgttcccagtccgcctcatcccgaacggcgaatagcaccgagagccagatgccgcgccgcttgccattgatgtcgaacagacagtagggcgttcctgcttccggcatcaggggatcatagggaaccgtctgcgcgacggcgtcggcgggcctgccgtcccagaaagtgccgatgagatcataggtggatttcatgcttgtccctttgcctagagatcgaagacaatgccggtgcccagctcgatagccttgttggcgaactcgacgagcttgcggtagatcgtttcaagccgtgggttgatcggctccgtgagccgccattcaagccatccgagcatgagcttgcactgctcggcgttcaagtagtccacgtctccagggtcgatgagcgaattgcacagcctgtctatcgggccgatgaagtccttatcgaggagatcctcgtccccctcggttagttcgaatgattccgtctgccccggcttcgcttggaaggtttcgggaatatagccgtagtagttgagaccttcaaggctgagaacaaggacaagttccatgatcacatttcccttctcttgagaattttgaagtgggtttctttgttgcttccaggcagaccgttgagcttgacgtttttcttcgttcttttgtcgtatatgcgcagatagcccgccaccatgtccgcgtcgattctccaccgggcgttctcgaacacgtacttgacgccccttctgcgcccctgggcaccgggagtgaaccggctgacaatgtcattgagatcgaccggctgcctcttccaactttcgttccacctcgtctcgcggtctttgcttctgtcgtagcggccctgatccaccatggagccggggacgtcgttgccgatgtagctgcgcgagctgtccgaataccgctgcttgctgtccgacatatgccatatgtcctttcctgcggcgccttgccgcatgccatcttgaagatgcgccagcattgtgagaatgcggcgcgcttcacctgtttgtatgagtgggtgggtccagacggtggcacaatgggatgtgcgagatagtccattgtgggccgtctggaccacggtgcgagaacttgccggttcgcgcaccgtttttttttattgcagaatctgtgccgggtcggcctgcttctcatccctcctttccaagaggagtccgcgtgcgtagagttcgaggatgctggcgtcgagcgcttcgtcatcatggcgatggcgcagccagttcgcatgctggttcaggatgttagaagcgcattccagcgaggtgccgaatcgctgagagatttcctcgatggtcgtgagaccgagttcttcgatgagtacttggggcgcgatagcgtatttcgcccagaaattcgcttcgatttcggcaagctcgctgtctcggagatggcctcgcatggtgtgtcccatttcatgcaatttggtaaaacgaattcttcctgagttttcttggagattgcaggcaatgtatcggctgtcattgccgtttgcgctaatcgtgaatgatatgccacttgggcagctgcagagcgtcatcaagtcatccaaggagacagatgggttgaatgcaatctgatagggtatcgtttgaattccgtgtgcatccagcaactctgatgggtcgatgggcagcctgatgtagccgagttgctggaatgcgtccaccacgctccatttcaactcctgataaaacgacgggtcgtcaatcctatatcccgtgatgtcctccttgttcccttgcagtcaacagagtcatgatgagctcccgcgtctccgcttcgctgagatcgccgccgtgcctggcgcagtacgccttgatcgtgccgaacggcgtatcggcgtttgattcgggcaggcccagcagaaattccgatgtggtgtgcagagcggtggctatgttcgcgagcgtactcgacgtgggctcccgctctcccgcaaggtatttcgagatattcggctgggttgtcccggctcgcgcggcgagctgggactgattgatgccatgctgccgcataagcttgcgcatcctgtcgccaagtgccgccgtcatatgatgtcctttgtctttaagcctgcgaggctccttttcaattgcttcacggcaatcaatataccacgattattccaaaaggaataatcgtggtgcaacaactaatgtgctgcaagtaggaaaacgcaagataagtcgttcccaaattgttgtcaccatgttgtcatacaaggctgcaatcaggtaaataaagccgctaaatcactggtatttagcggcttctcagcatcggtcaaggcgggttcgactcccgtcatccgccccaccactttccgctcccgctggcgggagctggctcgcgtcagcgagactgagggtgagactgagggtggttttccacctatcagatagctacacgtgccagctccagcagggggctcagttgcccgcgtcccccgtatctcccgcgtcgccggccatcttaatcagctgctcgatggtgacgaactcgtacccctgcttcttgagatcgtcgatgatgccgggaagcgcctcgacgtcctgcgaacggtcgccgccgccgtcgtgcatcagcacgatcgccccgttatgcgcgcccgtcatcacggcatcatgaatcgccttggctccgggacgcttccaatcgagcgtatcgatatcccacagcacgttcatgtcgatcaggtcggacgtctcctgccactgcttcttgccgaacgccccgtatggcgcccttagcactttcgttacatgcccggacgccttcttcatgttcgaaaacccggcgatgatttcagcgcgcaacgcgtcgcggctgagtgtcggcatgtccggatgcgtgttggaatggctcgccacctgatgtccctcctccagcatgcgtttctcggcgtccgggaacgacaggcactcctcgcccacgtcgaagaacgtggccttgacgcccttctccttgaggatgtccaggatcgggccgctgtatttgctcggcccgtcgtcgaacgtcagcgcgatgaccttcttcccctccgggcgcgggttcaacggcacgacgatcgtgtcctgcggctcgacggtgacgcctttgtccacatgcttgccggaacgtttcccgacccagtattcgtgcacgccgtctttcccggcctgcttgagtatctgtatcgagccgcctgcgatgccgatgctttcgccgtgcggcacggtctcctttctcacggtatggtcttcggtcacatcctcgcctgacgtcaccatcaccatgccatcctgcgggatcgtcgtgctgtcgattgcatcccggcgcacggcagcgccgttgatgctgacgacgatcggtttgccggcatgcttctcgatcatgtcgccggccacgtcgaccagattgcccggatgcgcgtcgaagtcgccattgtcgcgcagcagtcgtcccaacgtcatgtcgacgctgactttcatggaagtgccgtttaccgtgatcggtatctgccgccaatgccggtcccacatccaccagccaccgacactgccaccggccaacgccaatatcaccagaatggcgacgaatgcaatcagccgatgccgtcccctgccgcgccgcccgttatcggggccggctccgtactcgccatattcgttcccgcgcgtcttccccgcccggcgcacactgtccccaaacgacagctcttcaatgtactgcggttcttttgtcacgtcctaattttacggaggtgaagatgggagaaaggtgaggaacgggccgcggcgtgcggaggcgatggattccgcccggcggctccggccggagtagcggtggtgccaaatgttgcatggtcgcgggataatgcaggtatgacgattgcaactgccgaacgatacgctgaaatgctggacgccgcgcgccgcggcggatatgcctacccggcgatcaatgtgacgagctcccaaacgctgaacgctgcgctgcagggttttgccgatgccgagtcggatggcatcatccaggtttcagtgggcggcgccgcgtatttttccggtcaaggcgtgaacgaccgcgtgaccgggtcgttggcgttcgcggcgttcgcgcatgaggtggcgaagcgctacccgcatatcaccgtcgcgttgcacacagaccattgcgccaagcagtatctggacggttgggtgcgtcccctgctggacatggaggccgatgaggtggcgcacggccgcgagccgatgttccagtcccacatgtgggacggttcgacggttccgctggacgaaaacctcaccatcgccgaacagctgctcgacaagtccgtcgccgcgcgcacgatcctggaaatcgaaatcggcgcggtcggcggcgaagaggacggtcatagcgccgaaatcaacgaaaaactgtattccacgccggccgatggcgtgaaggtcgcccagcgtctcggcttgggagagcgcggccggtacatggccgcgttcacgttcggcaacgttcacggcagctacaagcccggcgtggtcaagttgcgcccggaactgttgggcgacatccagcgcgaggcggctcaggccgtggtggacgggcgtatcgcgtccgccgccggggccgtcgattttccgaacggcaagccgttcgctctggtgttccacggcggttcgggctctcgcccggaagagatcgccgaggcggtgcggtacggcgtcgtcaagatgaacatcgatacggacacgcagtacgcgttcacccgtgcgatcgccgatcatgtgttctcgaactacgatgccgtgctcaaggtggacggcgaggtcggcgagaagaagctgtacgatccgcgctcctggggccgcgaggccgagagcgcgatggcggcccgcgtcgtggaggcctgcaagcagctcggttccgccggcaaagccctgaagtgacgtcggtcgccgcggtagatgcaaccgcagctgtcgagttacggtcttccgatatgatggctgaatattggaaaaatgcgtcggcgcgggatttcccacgcaagtgcagggagagactgcaggaacttcaacaaggcaaggacggcaagttgcagccgttcgcgcccatgttgatatgggcgttgacaaaacgaatgcgacggtaaccgccgccccagcgcttaccttcgcagtagagggcatacggtaggctgttcccggcggaattgtgcggatgcggaggtgcagtatgtccggaatcgtgttgatcggcgctcagtggggcgacgaaggcaaaggcaaggctaccgatctgatcggtaccaaagtggactatgtggcccgtttcaacggcggcaacaatgccggccacagcgtgatggtcggcgaccagatgtatgcgttgcacctgctgccttccggcatcatcagcccgaacgtcacccccgtgatcggcaacggcgtcgtcgtggatccggaagtgctgttcgaggagattgatggtcttgaaagccgcggcgtggactgctcccgcctgctggtgagtgaggctgcacatgtcatcgcgccttaccatcgcacgctcgacaaggtgaccgagcgtttcctcggcaagcataagatcggcaccaccggccgcggtatcggcccggcctacgccgacaagatcaaccgcgtcggcatccgcgtgcacgacctgttcaacgccgagcacctgcatgacaaggtcgaagccagtctgcaccagaagaaccagattctggtcaagctgtacaaccgtcgcgccatcgacgtggaccagaccactgacgagctgctcaagctcggcgaacgcctcaagccgtacgtcgccaacaccggcctgattctgaacaaggctctcgacgagggcaagaccgtgctgttcgaaggcgcccaggccacgatgcttgacgtggatcatggcacttacccgttcgtcacttcctccaacccaaccgccggcggcgcctgcaccggcaccggcgtcggccccaccaagatcacccgcgtggtcggcgtctccaaggcgtacgtgacccgagtcggcgagggcccgttccccaccgagctgttcgacgaatccggcgaatggcttcgccagcagggccacgagttcggcgtgaccaccggccgtccgcgccgctgcggctggttcgatgcggtcgtgaaccgctacgccagccaggtcaacggtctgaccgacctcgtgctcaccaagctcgacgtgctcaccggtctcaaggagattccgatctgcgtcgcctacgatgtggatggcgagcgttacgacgatatgccgacggatcaggccgccttctctgctgccaagccgatttacgagaccatgcccggctggaccgaggacatttcgcaggtccacgagttcgacgagctgcccgccgcctgccaggcgtacgtcaagcgtcttgaagctctgagtaactgccgcatctccgtgatcggcaccggtcctcagcgcgaccacatcatttccgtccactcgcttctcgactagtcgccattcggcgatctcgccgacccacggctgccgggacagagtgaatccgcgtactacaagggtttcagatcatgaatcagtctgtaccgttcgtgccctcctcgcatgacgaatccgatggcggcgacgccgccggcgcgggggacatcgaatccgtctctgccgggtccgacgtcgccgacacttccgcgccggactcgactccaagcgaggctcacgccctcgccgcggacgagccggcgccatcgacccaagagatcagcgcctccgaaatcgaatacgcggcgcctcggctcaccggactggcagccgcggtagcaccaccttccattccactggccccggccaagcgcgtgcaggcgaaattcaatcccctcgccgatggcatgctgtatttggtggtgttcgtcggcgggttcttcggcacggcgatacgatacgggctctcgctgctcctgccgaatccggccgcgccaagtggcctccttcattcgttccacaccgccacgttcatagcgaacatgctggcgtgcttcatcttcgccgccctgagcacgtacatgtcgcaggcggcttggattcgcaagcgcatccgccagctggtcagccgcggtgtcggcatgggcatgtgcggcgggttctccacgttgtcggcgatgatgatcgaggacctgaactcgttgcgcgccgagaacatcgtgggattcgtgacctacacgctgctgagcttcatctgcggtttgatcatcgcgtggcttggcaccatgctgggccttgcgctgagccgaaaacgcgaggcgcacgtggtggctcgcgcggtgcgcgagtcgcaggccgccggcgctccgtccggagcagacttggctgttgacagtcaggccggttcggaaccggctgcgggccgcgtacaagacatgccagtatccgacgaacagcaccttccgtcgttcgaaccggatccgatcaccgcggaaattccgctcaggcctgatcctgaaaccggggaggtgcgctgacatgtttgccctgatctgtatgtgcggcggcttgggcgccgtgacgcggttcgtcctgaacacctcgattcaacggtggtggaaccgcgcgttcccgctgtccacgttcatcatcaacgtgctcgccacgttcttcgccggcgtggccgccgcggcctacttctaccagacggccgaccattcgtcgtacctgctgttcgtcaccggcttcctcggcggtttctctacgttttccacggctatcaacgagatggtgtcgctcgcccgcagcggcaaatacgccgcggccgccgtgtacttcatgatgaccgtgctggtgccggtggtgtgtgtggcgctgggttgggggctgatcgcgctggtgcggtagctcgtctgcgctggagtggctctcaaaactcgcagatacaaaatgatgttgttggaaaataggggttctgtttttgtatctgtaagttttgagagcgtcgttctgtatacaattaggcgaacagtcatattgtgacggcaaacgatggagtggggacatggtcgggatgcgtgatgtggccaaaaaggccggggtgtcgttgagtacggtgtcgctggtggtgaatggtgccgggtgcgtgtccgatgacatgcgcgagcgcgtcgccgaagccatgcgtgcgctcaattatgtgccgaacgagctcgcccgcaacctgtatcatgaccgcaccaacaccgtcggcgtcgtcgtgcccaccatccgccatccgttcttcgccacgttggcggccggtctgcagcgagagctgtcggagcgggggctgcgtaccatgctgtgctcgacggccgattcgggtactggcgaggccgagcacgtcgacatgctccgccggcatatgatggatggcatcgtgatggcggcgtacaccgagcacgctccggattactggacttcgatcggtcggcccatcgtggggttcgattgttatctcggcgagggcatcccatcggtcggctccgatcacgagcagggcgggcgactgatcgccgacctgttgattcatagtggttcccggcatgtggcgatagtaggcggcccgtgcaggcagttccatgatctggcgcagacgccgactggcgaggcgcggcagacggaatcgcccgggaacaccacgttcccgaccgtgcgctattacctgacgctggagcgtgaactgcagcgtgcaggcattcggtgcgagtacatcgaggccggggaagtggcggattttcagggttgcacgacggccatgcgcgaactgttcgaccgttttaccgacgtggatgccgtggtcagttccgatatcggtgccgcctgctgcgtgcaggaggtgtttcgccgcggcatgcgtgtgccgcaggacgtgcaggtcgtcgcctatgatggcacgtatctgaccgacatggcagggttgcgtctgaccgccgtatgccaggacttcgatgcgcttgccggcacggccgtcgcccgcatgatggatgccatcgaggggcgcccggtcgattccgccggtgacgtaatccctgtttccctgcgcgaggccgacaccactcggcgctgatcgccgcgcctccgccagcgagtccggaggcggtacctacgccaaccgcttcggcgacggcaccatcgcctcgctcaccgatgtgctgcgcacccgcttcgccggggtgtacgacggtgtccacgtcctgccgttcttcacgccgttcgacggcgccgccgccggctttgatccgatcgaccacaccaaggtggacccgcgcctgggctcctgggatgacgtggccgaactcagcaagtcccacgacatcatcgtcgacgcgattgtcaaccacatgagctgggaatccgcgcagttccaggacgtgctgaagaacggcgagaaatccgagtactacccgatgttcctgaccatgagctccgtattcccgaacggcgccaccgaagaagacctcgccggcatctgccgcccgcgcggcgaatctcgcaagttccgcactcccaaaagtctcacgcgacgcggccggcatatcggccgtgccgcgtcatcgtgtaatatgcgaccgttacgatagttgtatacccgtaacgagagcgcacaagagaagagaagtaaaccgatatcatgaccgatgatcagcagcaaccgaacgaattccccgctccgaagccgttgccgggcagcgtgtacattcgccccggcatcgatgatcggcctgattacgacaaggtgctcagccccgaagacaagtccgcggtcgcccgcttggccgtgcatcagccgcggcgcaaggtcgaggcgtccgtgacgcaagccgagacccaggtcgcgcagatgacttcggagggatctcccgcggcggccgcggcctctgtcgacacggcggtcccggacatgggctcggcgtacgtggacatgcgcgacccggtggtcagcgccgacggccagcgcccgaaccccggtcaggtgacccgcctgtcgtggggcttcgcggtgggcgcgaccatgtcgatcgtgccatgggccgcattgaacctgctcgcgctgcctgcggtcatagcgaaagtcagctggcagcgggtctccggcgcggttgcctcccgcgcggcgttctccggtggcggccagaaactctccgagagcctggtcagccgcattggcgcggtcggcgacggcggggtggcgtcggcatgggccattgatctggccgtggttgttgtcgtgggcgttgtcgtgtcgctgattgccgaggccgtcgtctccgcgctgtccgatcgcacgcgcgtggccgctggccggcgcacgccgtggatcatcgcaggaggcgtcgtctccgcggtgatgacgctggcgctgggactgtgctcgaacgtggtgggcatcgcgttgctgtggggtctggtgcaggtcggttatgtgatgctgaccgtgccgatggcggccgcgttcagcgagcgagtgcccgacaagttccgtccgcgcatcgtgcgcgcgcgtggcatcggccagatggtcggccaggcgctgggcgtgtggatcggcgtcgcctgcgtcgtgttcggcgggctgtatacgccgttcgtcacggccgccgcggtgttcctgctggccggcatcgtgccggtgctggtgtggccgaaggaaccgtcgagcgaggagcagccgcatacggcgatgagtgcgcacatgctgatggagcggttccgcgcgccgcggcgcgccgtcgaattctggaaggcgttcgcttcgcgctccttggtgtcggctggtgtcggactgacgaccatgttcctgtggttcatcgcatcggcgctgatcttccgggattggttcacgcaaggcaactcctctccgatcgcggtaccggtgtgctcgttgatcgcctcgatggccttggcgacgctcgtcggttccgtgggtgccgcgttcatcgccggtccggtgggtgagtacattgaggatccgcggtatctgtcggtcatttcctgcgtgctgtacacggtggcgttggctttgcccatgaccatgccgagcgccgtcagcatggtgctgttcgccctgatcggagggttcgcgttcggcctgatcgatacgttcggccagttgcttgcgatgggcgcgttgccggatgcgcgttcggccggccatgatttggcgttcttcaacctgtcgaattccgtcggtctggcgctcgccgcgataatcggcgcggtcggtgtggccgtcaccggcggtttctcggtgctgttcccggcggccatcgtctgtgtgctcgcgtccgcggtcgtcacgatttcgatgaagcgctagcaatccggccggattggccgctgtcgcgcctcgtttgggattgaggcatcatcctatccgcgattagtcccatccgttgctgctgaaatgggactttcgcgggatggggcgtcgatgtgtctgtctgtaatgcaggcggaacgcagacaggttgtgccgacgccgccgatgttgttatgctgcggccgtccacatagtgaacctttgatggctgtcgtggaattccgcgcctatgttgtcggacagtcgagcgcgaaagagctcgaaagacacgttcaataccgaaaggaggttcgccgcgatgactggatatgctgctgataacgccgctaacgcaactaccgttaacgttgttctgctgtctgcacgaattattattccgtcttcgttggcggactgattcggcatcactgcttggaaccccgccaacgaaggcagggctcagcgagcaaccaatcgtatagccctgcacgagtcgcggggcttttttgatgcgtcccacaaggtcaccggatcagcaaagcggcaaacgagagagaacagaataaaaaatcgcgggctcgtccgcgtgcagtaacaggagctaacaatgacagcagtcacactgacagctgacggcaccacttcggtgggtggaaaagcaaaggcgatggtccgtgactcggtcaagaccgtgatcgccgcctcgatggtcggaaccgccatcgaattctacgacttctacgcctacggcaccgccgcagcgaactacttcccgcgcatcttcttctccgcgaaggacaaccccaccgtcgcgctgctgatgagcctgctgaccttcgccatcgcgttcatcgctcgtccgctgggatccctgatcttcggccacttcggtgaccgcatgggccgcaagaccacgctggtcgtctcgctgatgaccatgggcgtcggcacgttcctcatcggctgcctgccgacctacagtcaggtcggtgtcggcgcggtcgcggtactgtgtctgctgcgtttcatccagggcatcggccttggcggcgaatggtccggtgctgcgctggtcgccaccgagaacgcgcccgaagacaagcgtgcgctgtacggctccttcccggagctcggcgccccgatcggcttcttcctgtcgaacggcacctacttcgtgctggagtcgttcaatgacaccgatgcgatgtgcgcctggggttggcgtgtgccgttcctgctgtccgccgtgctggtgatcatcggcctcgtcgtgcgagtccacatggaggagaccccgatcttccgcatggcccaggagcagaagaaagtcgtcaagtccccgctgactgaggtgttccgcaagtcctggaagcaggtgctgcaggcgacgttcctcgcggccgtgacctacacgctgttctacacgctcgccacctggtcgctcgcatggggcaccaagatcaagcgtgaaggcggcggcgacctcggcttcaccaaccaggagtacctgctcatgctgatgatctccatctgcgtgttcgcgctgttcatcgtgctttcctgcctgtatgccgaccggatcggccgtcgtcgcgtgctgatgttctcgtcctgcgcgctggtcgtgttcgccgtgctgttcccgttcctgctggacagcggcctggtcggtcagaagaacttcgcggccaccatggtgttcctatgcctcggcttcgccctgatgggcatcgccttcggcccgatcggcgccttcctgcccgagctgttcgacgcgaacgtgcgttactccggctccggcatcggctacaacctcgccgccatcgtcggcgctgctttcgtgccgaccatcgccacgtggctgtcgaagaacttcggcgtgcattcggtgggtctgtatcttgccgtgatggccgtctgctgcctgattgcgttggcgacctgcaaggagaccaaggacgtcgactttacgaagtgacggcgatggtcgggtaccgcccggccgcgcttgaactcccaaaaaataacaacaatacacaaaaacaatcattcaatatttggacgtgggcaaccacgtcgcctccagtggtactagaaatgagccacaggaggggatgactttggcgcgggacacaatcccgcgtggaagccgtctgcaaccaagagggccgtcgaaagcgagcgcgttcggcggcaagacatccaattaaaggagtgcctattatggcagcaactatctggtatgagaaggacgccgatctgtccgtgttcgatggcaagaaggtcgccatcctcggttatggctcccagggccacgcgcatgcgctgaacctgcgcgactccggcgttgacgtggtcgtcggcctgcgcccgacctccaagtccgtcgagttcgccaaggagcagggccttgaggtcaagccggtcggcgaggccgtcgccgaggccgacgtggtcatgatcctgctgcccgatcagtaccaggccgccgtgtacaagaaggacgtcgagccgaacctgaagccgggcgctgccttggccttcgcccacggcttcaacatccactacggctacatcaagccttccgaggatcacccggtgttcatggtcgctccgaagggcccgggccacatcgtgcgtcgtgagtacgccgccggccgtggcgtcccggtcgtcgtggccgtcgagcaggacccggacggcaagacctggccgctgtgcctggcttacgccaaggctctgggcgccctgcgcgccggcgccatcaagacgaccttcaccgaggagaccgagaccgatctgttcggcgagcaggacgtcctcatgggcggcatcaaccacctgtgcgacctcggcttcgacgtgctgaccgaggccggctaccagccggagattgcctacttcgaggtgttccacgagctgaagatgctggtcgacctggccaacgagggtggtctgaacaaggcccgttggtcctgctccgacaccgcccagtacggcgactacacctccaccgtcatcaccgacgagaccaagaagcgcatgcagtaccagctcaagcgcatccaggacggctccttcgccaaggagttcatggatgaccaggctgccggcgccccgaagttcaaggaactgcaggagaagttctcccacccgcaccttgagaccgtcggcccgaagctgcgcgccatgttctcctggaacaacggcccggccaaggaccaggacgaagccgagtccttcaacggcaagatcgctcgtacccaggttcagtgatcgcctccgctccggctcccgctggagggagccgccagtcggtcgcagactgactgagagcggtgcataacaaggccgccgttcccgttcattcgggagcggcggccttctgcgttgccggtgatgcggccggtaacgaagccgacattgccgcgtcctgcgccgtgtcacccgctccctgcctgaactgttcatactccaatagtgagatggttcacgttgtggacggtgagggggctgtggcggcgttaccggtaggatagtcctcagttctaaggacaaaatccttaacgcttggatcgaccgggcccatgcccgaccccaaacgcgcggaatgcaggctcctgcataatgcgcaaccacaaacgacaccgtgtgccggcaagagtgccggtacgcaagtaaaggagtgccaaacatggctgcacaaatctggtatgacaacgacggtgacctctccgtactcgaaggcaagaaggtcgcgatcatcggttacggctcgcagggccacgcgcatgcgctgaacctgcgcgattcgggtgttgacgtggtcgtcggcctgcgcccgacctccaagtcggtcgccttcgctaaggagcagggccttgaagtcaagtccgtgccggaagccgccgccgaggccgacgtaatcatgattctggcccccgaccagtaccagcgcacgatctgggccaacgacatcgagcccaacatcaagccgggcacggccgtcgccttcgcccacggcttcaacatccactacggctacatcaagccttccgaggatcacccggtgttcatggtcgctccgaagggcccgggccacatcgtgcgtcgtgagtacgccgccggccgtggcgtcccggtcgtcgtggccgttgagcaggatccacgtggcgacgcttgggacatcaccctggcttacgccaaggctctgggcgctctgcgtgcaggcgccatcaagaccaccttcaccgaggagaccgagaccgatctgttcggcgagcagaatgtgctcatgggcggcgtgaacaagctcgtcgagatgggcttcgaagtcctcaccgacgccggttaccagcctgaaatcgcctacttcgaggtctgccacgagctgaagatgctcgtcgacctcatgaacgaaggcggtctgaacaaggcccgctggtcctgctccgacaccgcccagtacggcgactacaccaacacctgcatcgacgagcacgtgcgtgagcgcatgcagtaccacctcaagcgcatccaggacggctccttcgccaaggagttcatcgacgaccaggacgccggcgctccgaagttcaaggcgctgcaggaggagtactccaacgtgcgcatcgagaccgtcggcccgaagctgcgcgccatgttctcttggaacaaggacgccgtgaaggacgccgacgaggccaactccttcaccggcaagatcgcccgcgcccaggtgcagtgatttctgaagctgtgaggccgtaagaccgtagagctgtaaagccaggccttaccgcatgactcaggtcgttgtcttcgtcgttcatcgccgaagacgacgacctttcgtttatctggtcctattaatgtgttcgtaagcaatgtgcttacgaacacattacgagtatcaagggttgctatcacgccaaattgcgtcactgtgtgcgccctcgcacacagtgacgcctgtgtaaaccctttatttttcaacggttctgcagattgcgtcactgagagaggtcgcgcacagtgacgcaatccgcacacagtgacggtcgataaccatggttgtgtcgcacgattcgcatgtttcgtatgatcacgtgcgagttgcaggatccgacgctggtggtatcagcgccgaggctcgttcgctgtcgtcttccgcgatgcccgactcatacgcggcgccctttgcggcgttctctggcgcggtacctacgttgccgctgacgggccgtctcagcacgatcatctgccagcagtgcccggaatttcgggtgtggtctattccggcaggtggtgtcaagggctttcgccaccctttgcgcgaatcgtcgccgcccctgcgaggtcaatatatcatcggcaaagacgacgatgactgtatatcccatcgcccgcaaagcctgcctcttgcgttcgtcccatcggtattgtcgtttgtcgcggcgatgcgcgtctccatcgtattcgatgatgacccgttgtttggggtatgcgatatcgactgtcgcctcgtgagccaactccggaatgagtatcttccagtgtttgaccggctgcggcaatccatgtcgcaacatcacgagagtgcagcggcattccatggtggagtcagtcacggcatcgaggaaaacgagagcatcaatgcatttccttctgcccgggaacgcgtctgctccatcaaggaaccgcgagatattggagaccgtcatggagcctgatgacgcgcgcagtatggcatccgccagaacgattacctcgatttgcgtgagatacggcgccagcagtgcccatgtcatcagcgggtgcgtgtagacgatggtgatgttgtcgtgagtccatgtgaggtgggcgatgcccgtcaacgatggcgggcatttcaggtaggacgtatctttccgtccggatctcttggttggctccccaatgtacagtacttggaacttcacggcttcaaatcttgaacatagcggtgtctctatgcctgccagacgtaatgcggtcataccggtatagaccggtggcgaggtgttgatggtttttcgtgagtgttccatgcaatgcaggaacgtcgtggattgcagctggcgcagtgagcgcgcaagatagttgttcgcgactgttgcgctggagctgacaggggtgtgctgattcgtattcatggattgaatgtaagcatgataatctgcagtgcgccaccggccgcctcaaatctgtggataagtgtataactcatcggttatccacagtgatgtagcgaatgtggatatgtaactggcggagatgctgcgtgtggtgctgctctgcggatggaggaacgcgtcactgtgtgcggggtgcgtcactctgtgcgtcctcgcacacagtgacgcccatgtaaatcccttatttttcaacggttctgcgagttgcgccactgagagagggcgcacacggtgacgctacccgcacacagtgacggtattgcgggcttccgccgtgcacgggtacgggtatcggatcatgtgactgatccgatacccgtacccaacgcctcagagcgcctgcgggcgcaggacgagatcgaaatcgaactccgcgtcgtcgaggcggtacttctcgtgcagcttgggaccgcagctgttggacccgacgccggactgcatgtaatccacgcacaccaccgtcgaatccgccggcttcagctcgctgttgtgggccttggcggtcagctcctcctgggtgtaaggcagcgcctggaagtcgaaggcgtggtcaccggcacggagcaccagcagctcggcgtcatcgctggcgacgctcgcccaatcgcagtcgtgatggttgccgttctcctgcggcttgatatacggctcgaacagcgattcgggagtgccggagaacacgccatgatagctggaccggcgtttgtcgatgtagctttcgttcgggccgagaccgcaataggcgatctgccgcatcgtcttcggcacgaacaggcgcaggccgaaacgcggcaggaacgggaaatcggtgtcgcgcatcacatgcatgcgcagcgccaccgaaccgtcgggcgcgatggtccagtcggcgtcgatgtcggcgatgcgctgcacaatcggcgccaccagcgccatcgtcgcatggatcgtcacctggccgtcgaccaccaccgagccgtcctcggacgtcgctatggcgctcacgtcgccggcgtcgacgttgccgtcgtcgaggatcgcatcgtctccaaacgaggcgaccggcgcatcctcatcgtccgcacgcagttcaatcgactcgggcttggcgatgacgtcatcctcatcgaccagtacaccgacctcgtacgcgcgcgcctgagcgcggtcatactgggcgcggatccagtcggccttgatgtactggtcgttgtcggtgggagcgcgccacacgttcagctccatcggcctgttaagcagcgaccggttcgcgaacgacatcgacgagaacaggccggtacggcggtcgagcacataccggaacgtcgagccttccacggtgatcgaggcatcggtctgcatgacggtcagcgggtctgccagcacgacgtcgtcgtagccggcatccgtggcatcgttcgctccgtcgtcggcgccttctacgctatcggtgccgtcatcggcaacgtcgtcggcatcgtcatccgagccgatgccatcggcgatatcggacagcgcggcgacgaccgtctgattgcgcggatccgcggtcggcacggcgacctcgtcgaagccgagctcgaagccgatcggcagtgtctcggtgtccgtcgcctgatagtacttcaccagcatcgtcacgttcccggcctcgggtatggcatcaaggatctcagccggtatgtcgacgaccgcgtcaccatgcggcgcgatcgatggcatcgacggcgtgtaattgccgggatgctcctcccggaacgccgcgcccgccgcaggatcactctcccacgcagcccatgcggtctccgcgccatccaccagcagctcgaacgtcatgaacaccgcgtcggcggcatccaggaagtccaggtaattgtgcagcgtcaccgtgcccgcggccgcgtcgaaaccggtcacgcgcaccggccgatacacgttcttgaactccagcagcccggtatgcggcgtgcggtccgggtacaccaagccgtccatgcagaaattgccgaaatgcgggtactcgcccgaatcgccgccgtacgcgtactcgcgctcgccggccgcgttcgtgccacggtcgatcgcatggtcgcaccactcccagatgaagccgccgaccaggccgtcataacgctggatgcgcgtgaaataatcctccagatcgcccgggccgttgcccatcgcatggcagaattcgcacagcacgtacggcttgacgccgttgtcgccgtcatcgccgttgctgccgtcgcgcagcccgtccggcgtgcgcggcccctcctcggagaagtactggtcgatctcctcgacggacgggtacatgcggctgtgtacgtcaagatagctgtaatcgcactcctgtccctcatccacataccgggcgctctcatagtgcgtcaggcggctcggatcgaaggtctgcgtccacagcagcgccgcctcgaacgtacagccgtacgcacactcgttgcccatcgaccagaagatgatgctcgcatggttcttgtcgcgctccacgctgcgctgcgcgcggtcaacggtcggcgcgatccacgcggggttgtcggcgataggccggttccagcgcttgttgacagccgcgtcgctctcgtccggatgcacgccgcgcatcgcgccgtggctctcgttgtcagcctcggccaccacgtagaagccgagacggtcgtacaggtcgtagaagtgcggcgcgttcgggtaatggctggtgcggatcgcgttgacgttgtgctccttcatcagcgtgaggtcgcgcatgagctgctcctcgctgatgaccgggccggtcaccgggtcgctgtcgtgccggttgacgccgtggagcttgatcggcttgccgttgaccttgaccacattgccatccacgctgacctcgcggatgccgacgagcgcggtgatgacctcgttcgcggtggtgtacacgatggtgtacaggtacggcgtctcggcggtccacagatgcgggtcgtcgactgccagggatgcgtgcgcggtcggggcgaacgcgctgtctccggtgaatccggtgccgttcgcgccgccggcgagcgtgccggtcaccgacgcgatgcgcagtgcggcctgtgcgtccgtggagtcatcgtcgatggcggccacgtcgtcgatcgactcgatgacgccttcttcttcgtcgtccgcggcggtatcgtcgctgccagtgccggtcgcgtcgtcggcttcgctcgcgtcgggctgtgtccgaaccgtcacgtcgtcctcgtccccggccatcggatcatcgatcggctccgaggccgcctctgccaccagctcgccatcctcatcgaacagctgcaccttgaccggcacatccgcatcgtcgaagaacgcgaaatccacgtcgaccgtcgcgtgatcgaccggcgacgcatcatattcgtcatcgctgatgccggcctcaaccagcgcggaatcgacattgcgccaaatcgacgtatgcacgaacatgtcacgaatcgcatactcgggacgatccagcagatacacgtcacggaagatgccgctcatgcggaacttgtcctgatcctcctgatagctgccgtcgcaccacttcagcaccagcacggccagcgtgttcacgccgtcctccagcacgtcggtcacatcgaactcgctggtcgaatgcgacacctgcgaatacccgacgaactcgccgttcacccacacatagaacgccgaatccacgccctcgaaattcaggtacgtgcagggcgcgtcaggatcgggcgtatgcatgaaatcgcacaggtacacgccgcacgggttgtcctgcggcacgaacggcgggtcgaacgggaacggatagtcgaaattcgtgtactggtggcggtcgaaaccatggttctgccacacgctcggcaccggcgtcgtcgtgaagccgtccgccgccagcgcacccgtggcggcagtgcgcggatcggcgttctccggtgcgtcatccccgccgaaatccacgtcatagaacaccgggcggccggcggcgcgcagtcgggagacctcggcgtccaagtcgtagatgctcgcataatacttgaaatcccagtcgccgttcagcagcatgaaacggtcggaattcacgcgattctcgccgaccgtgtccatcggcgtggacgcgggcacgtaatacgcgcggttcggctgcgtgccgacatgtagatggccgagactctcgtagtaccggggaatgaacatgatggagccctccttggttgtgcatgtgccagtgcgatgacactgcacaccattatcggcgtcagcatggtcgagaagtaaggcctttgcctggcttccggcgatattcgcgggtcctggaaaggtggtctcgcgctaaaccaaggaaaatggcggctcgcaaggtttgtggggacttcgttgtgacttgtgttcggcgtgtcggattatggtgggctggctctgtgcgctcgtgagccgttccggctctgttcgcgcgtgcggcggccatggctccatccgcgggatgtgcgcgactaagggcggacggtcttgcgcgtctgcgtgacctggtatgcggtcagcagaatcgcaagccacaccacaccggcgatgacggcgacgcgatagctggacgagaagcacatgagcaccacgacgaatgccaggaatgcgagcactacatacggcatcacgcgggcgaacggcagcttgaaatggatgcgtcccagagcctcgtctccggtgagcccggccagctcgccgggcccgtctccggccgccacacggcgacggaaatgaatctcggtgaccatgatcatcgaccagttgataacgccagcaatcgtggcgatcgacatcagataattgaacgcgaaatcgggccacaggaacacgaccaccacggccagcgcggtgatggccgcggaagcgagcaccccgacaaccggtacgccgtggaagttgagcttgccgaggatttcgggcgcgttgccctgcctggccagcgagtacaacatgcgggagttggcgtacaggccggagttgtacacgctcatcaccgcggtcagacacacgaagttgaggatgccggcggccgcgtgcacgcccaccgagtcgaagatctgcacgaacgggctggtcgtgccgtcgatcgtgttccacggcaccacggccatgatcacgccgagcgcgccgatgtaaaacaccaggatgcgccagatgatgccattcgtcgcgcggggaatggttctgcgtggatcttcggtctcgccggccgtgatgccgatgagctcggtgccgccgaaactgaacatcaccacgaccaacgccatcaacagtccggtccattggccgtcggcactttgctgcagcaggccgtgggggagtacgccgccatcgagcgcgaaccagttcgagaagctcgccttgacgccggaatccgttggcagtccggcaatcagtaccgcgagcccgccgacgatcatcgctatcaccgcgacgatcttgatgatcgcgaaccagaattcgaactcgccgaacttgctcacccccagcaggttcatcgccgcaatcacgacgagaaacaccgccgccgacacccattgcggaatcgcgggaaaccagtagttgacgaacgagccgaccacgctcagctccaccatcgacaccagaatgtaattgaaccagtagttccagccgctcacgaagccggcgcgcttcgaccagtagcgggtcgcgtagtagctgaacgcaccggccctcgggtcttcgaccgacatctcgcccagcgcccgcacgatcatgaagatagccaacccgcccacaagataggcaagcaggattgacgggcctgccaacgcgatcgactcgctggagccatagaagagtccggtgccgatcgcccctcccagcgcgatcagctggacatgccggttcttcaacgatttgcgcaacgccgccggtgccggcgtgttgccggtgccggggcgggaggccgtcgccgtgccgtcgtgcatggtgttcttgctcatcggttcctctccatcgttgccgcacgccggagactgctcgcggcattggccgtctgcccgtcgttgacccgctcgcgcccgtcttcgacattgccgtcatcgccggtggggccgggccgtgatgccgtgatcgccgcacccgccgcaacgcaggccgatatcggcacgaccgccattctatgccatccgctgacgagtcgacgtcaccgtgcgccgttttgtctcccgcatcggctcattggggtgcgtcatgccgcggtgggcaccacggtcacggtctgagccttcctcatcgtcgcggcgtcgacttttcgtggctatctgcgtttcaagggggtgatttcgtgttcgccgaacatctatctgagtttcagggggttgccaaaacatgatacccggagtattgagcaccaattgccattggaatcatgcggtcttgagggcgtttatactcggctaccaacccctcgaaacgcagatagatgttccggaagagcgccatcaaccccttgagatgcagatagcccaattttgccgcaacatgtctgcggttgagcgcctagcatcacgtttgcataatcgtgatttactaaatcgcgattatgcaaacgatctgtgccggtgtgaagaatatgtcatgccccgtcgattccttgtgaccagcatctccgattcgtctagtgccgctgcggcactctggccgtatgattccgggtgggccgaggccggaatcgtctgtctcaccgggcgccgggcatgcccatggtgaagatgatgtgggcgacggtttctggtggggcggcgaggtcggtggcgagccagtactgcagcagtccgatgctgccggatacggcgaaccgcatgcgcatctgcgcttcggccgggtcgctggaggcgggctgcatctgttcggcgacggaacggcggctgtagatcaggccgagcagctgttgctggaaatccaggtcggcggtagggctcatcagcacttgcagatggttgcggttgtcggcgatatagcggcagatgtgctcgatgacgtgctcgacgccggccgcgtcaggctgcatgagcagctggtcgagcgcggtcgtgacccatgccatcgtttcgtcctcgatgtcgtgtagcagctcctcgatgctgtcgtagtgcgcgtagaacgtggagcggttgacgtccgcctgctcgcacagcgccttgatggtgatgctgccgagcggccgttcgcgcatcaggtcgatgagcgcgtcctgcatcgccctccgcgtgtaacgggtgcggcggctttcggtcagttccttggccatggctggtccttgcctcgtatggtctcgcgctggcggattcctgcccgacattcggtaatccgactgttggttgcgaaaccgacatagtgttgttttacttgagtataacatctgttgcgtgtgcggggaggtgcatgatggcgtatatcgaattcgaccgcgtggtcaaggaatacccgtccgggcgcaccacgatccgcgcactggacgaggccagtttcaccgccggccgaggcgaactgacggtgatcctcgggcagtcgggcgcgggcaagaccacggcgctgaacatccttggcggcatggacaccgccacctccgggcgcgtggtcgtcggcggccgcgacatcaccggactgcgcaaacgcgacctcatagcctaccggcggatggacatcggattcgtcttccagttctacaatctcgtgccgaatctgaccgcattggagaacgtcgaactcgcgtcgcagatctgccccgaccatttcgacccggccgacaccctgcacaaggtcggcctgggcgaccggctgagcaatttcccggcgcaactgtccggcggcgaacagcagcgcgtgtccattgcgcgcgcaatcgccaagaagccgaagctgctgctgtgcgacgagccgaccggcgcgctcgactatgagaccggcaaggaggtcctgcaactgctgcaggacatctgccgtgacgagaacatgacggtgctcatcatcacccacaactccgcgctcgctccgatggcgcacaaggtcgtccgcttccgctccggcaaggtggtgggcgaggatgtgaatcccgcgccgacgccgatcgccgacatcgaatggtaggtgctgtgatgggacggcatgcgcataggaacaaaggtcggaaggcggacggtgattctgccgggtggtcgcccgcgtccgatgtgcccaccgaggtgattcccggaatctacgacttggcggccgacaccgatacgggcggcaggccgtctcgtgggcgctcgctgtcgggggcgttcgtcaaggatacgatgcgctcgtggctgcacgggtggaaacggtttctgtccatcgccgtgatttcgctgcttggggtggcggtgatgaccggcatctacgccggttgtcgtgacacgttccgcgccgcgaaccggttctacgacgcgcaacggttgcacgatatccaggtgctgtcgacctacggtctgaccgatgatgacgttgcggccctgaagcaggtccgtggagtcgatgtcgtacagccggaacgcagccagagcgtcgaagccgacgtcaagggcaccgacaaaaccgtcaccatcaacgagatcggcgtgaacggcctcgaccagccgtacctacaggacggccgcattccgagcaaggctggtgaggtcgcggtcaccaaaaagttcctcgccgacagtggcatggcagtcggcgactcgctgaccgtcaccccggtcgacaccggcactgcgacatcgaccgtttcggatacggactccgccgacagcggcgcgaacggcacggaaccgacggacgagcaagccgatgcatcgcaatcggcgccgagcttcccgaccgagctgaccatcaccggcacggtgatagaccccaagaacctgagcaatccggacggatacagcggtgccaaggcattccgcaactcgctcgcgtccgactacacgttcttcgcgccgagcgacggcgtgacaggagacatctacaccgctatcagcctgaccgtgagcggctcgaccggcgaggacgcgttcggcgacgactatgacacgctggtccgcgatgtcgccgaccgcatcgaagccacggtgcagaccaagcggcagaacgaacgccggcagactctcgtggacgccgcgcagaagaagctcgaccaggcgaagaccgacgcctaccggcagctcgacgacgcgcagatgcagatcaccgagcagacggaggggctgaaaacccggcgcgagcaggcgaaaaccaccaagcagagcctcgaagaccagctcacacagctcgaagaccaatcggagcagctgcaggacggcaaagaccaggtcaacgtgggactgctccaagcccgccagggccaatcgcagctgcagcagggcatcgccaccgcgcagacgatgaacgacctggccgcgcagggcgcgcgggccgcagagcaggccgcggacgcggcagaccaggcggtcgccggcgcgcaaggtctgcccgagacggtactcgaaccattgcgcaaggcagcgaaaaccgcgcgcgatctcgccacgcaggcacggtccaaagccgatgaatccgcggcacagctcacgcaactgcaatcccagctgagccaggtcaacgccaccatagcccaactcgaagcgcaatcggccaccttgcagcggcaaaccgagcagctgcgcggcggtcgccagcagatccgcgacggactcaagcagatagccgccggcgaagagcagatggacaccggcgaacggcagctcaaggacgcacaagaccagcttgacgccaagcgcaaggatgccgacagtcagttcgccaagcagcagcaacgcgtcgacgacatcgccgcagcccgctggtacgtgcagacgcgctcgtcaatcggcggcttcagctcgctcaaatccgacatcagctcaatcgaatcaatcggctacgctttcccggtcgtattcctgattgttgcggtgctgatgagcctgaccgcgatgacccgcatggtcgaggaagaacgcggtctgattggcacctacaccgggctcggttacgggaacgcggccatcgcgatgcgatacgtgctgttcgccgcgctcgcctgcctaatcggcggcggactgggactgatggtcggcttcctcggcattccgtcgtttctgctgctggtgatcgagggactgtacacggtgcccggcatacagctcgaatacgattggctgtacgggtcggcaggcatcgcactgttcgtcgtcggcgtggtcgtcgcaacggtcgtcgcctgcgccggggctctgcggcaaagcccggcgcaactcatgcagccgaaagcgccgaaggccggcgcgcgcatcttgctcgaacgcatccgcccgctgtggcggcggctcagcttcctcaacaaggtcaccgcgcgcaacatattccgcttcaaaagccgcctgttgatgaccgtcggcggggtagcgggctgcacggcgctgattgtgtgcggcttcgccatcaacgacaccgtcgccacgctcggacccaagcagtacgaggacatctaccattacgacctgctcgtcgtcagcggcgacgacagcgtcgatgcgatgcgcgctcggctcgacaaggacgggcgcgtggaacgttcgctcgatctgcggctcgacagcggcgagatggacgcgggcgacgcaggcgagacgattcagctcatgatcgtgccggatgattcagcaggggcgctcggagacatgattacgctgcggtccgcgagcggcgggcacggcaagctgcagcttgggggcgatggcataatcgtcgcgcaatccgcggcgaactcgctcggcgtcaaggccggcgacaccgtcacgctacgcgacggcagtatgcgtcacggcgaagtgaaggtctccgcggtgacgcgaaacctcatcggctcgaacgtgtatgtcagcgaaagtctgtacaagaaaacattcggcgtgtcggcggcggtgacgcacaacgccgtgatcgccacactgaacggaaccgccgaccagaacatcgcgtacgcggatcggctcgcacgcgatccgtcggtcgtgagcgccaccagcaccgacgatctcgagcgcagcttctcgttcgacctgatgagcgccgtcgtggcgctcatcatcgcgctcgcgggcgggctggcgctcgtcgtgctgttcacgctggcgaacacgaacgtgtctgagcgcgtgcgggaaatggccacgctgaaggtactgggcttctacgaccgcgaggtacaccggtatgtcaacaaggagatgctgatactggccggcatgggcatcgtcgtcggtctgccgctcgggcgcgcggtcggcgggctgcttacggcggcgctcaacatgcccgcgttgtatttcgaagtgagcgtgcactggtacagctatgtgatcgccgccgcggcgacgatggcgttcgcgctgctcgtgcagctgctcaccaatccggtgctcgaccgcatcgatccggtcagctcgctcaagtccgtggagtgagctgaccgccaccgccctacttgtggtatggctcgccggcgttgattttgtaggcgcggtacagctgctccagtaggatcacgcgcatcagctgatgcgggaacgtcatcttcgagaagctgagcctgtagtcggcgcggcgcaggatcgcgtcgtccaggccgatcgagccgccgatgatgagctgtatgtggctttcgccgtgcaatccgagctggttgatgtgcgcggcgagcccttcggaggagagcatcgtgccgtcgatcgccagcgcgatcacataggcgtcggggcggatgtgcttggcgatgcgcccgccttccttggcacgaatctgccgttccacgccttcgctggcatgttcgggggtcttctcgtcggcgacctcgatgatgtcgagcttgcagtagcggccgagccgtttgctgtattcggcgatggcgtcgcgcagatactgctctttgaccctgccgacgcaaatgacgctaatacgcattatcctgctttctatctgcccggaggattacggaagatacgccgtcgtactactccgagagtcacggcacgacgataccgcgactctcaaagtccctcggtgggggattggctgacgctccgccagtcaatcccccaccgagggcattggttgatgtgtgcggatacggccgttcaacgccgaaggcgtatttcgtacgtcgagcgctgaggaaaggccgtatacgctccatcaatcaatgacgccgtagaggcggtcgccggcgtcgccaagccccggcacaatgtacgccttttcgttgagtttttcatcgacggcgcagacgacgaccttgaaggcgatggaggggtcgatgtggtcttggacgtattggatgccttcgggggcggcgatgatgttgatggcggtgacgtctttggcgccgcgctcggcgaggtagtgggtggcggtgacgagggtgccgccggtggcgagcatggggtcgatgaggaagcactgacggccggtgaggtcttcggggagacggttggcgtaagtgatctgctgggtggggtgctcttcatcgcgcttcatgccgaggaagccgacttcggcggtggggatcattttggtcatgccgtcgagcatgccgagtccggcgcgaaggacgggaacgatgatgggggcggggctggcgatgtgcttgccgaccatgggggcgacgggggtttcgatgggcttgtcgacgatgtcgaggttgcgggtcgcctcgtaggcttcgagcatgacgagttcggtgacgagctcgcggaaagtggcggatgaggtgtttttgtcgcgcaggacggtgagcttgtgttccaccagcgggtggtcgagtacgtgaagttccatgagtaccagcgtacccggttatctcacattctggatggacgtagcgtgttgcttatgtgacgtaatggtcaagatgtgcagtgaggtcggactgcaggagccgaaggcggtttcgacggcgacgatatcaccaaggccgcgccgaaccagcgcatccgcaaaggcatggcgttcgtgccgcaggggcagcagtcgttcggcacgatgaccgtcgacgagaacctgcatgtggacgccgaccggtacgggtccgaggcgaaagcgcggtacgacgaggccgtgacgatgttcccggtgctcaaggaattcgccgtcgaacgggcggatcgctactatgtgctggcctccgggcgcttcatcgccaccggcgaaggcggtcctgcacaggttgaggccgccaaagaggccatgcgcgtataatcgcgctctcaaaacttgcagatacaaggcttttttcgagcgtcaatcgttatacctgcgagttttgagagcgcctattgcagagccttcatcaaagaagccacatgacccttcgcccggacgttgtaacgggcgatttctatcgtgccggctgcgcctgtaacagacacgctgatgacgaatgtcgagcggatcacgcctatgtgcgtgcgcccatagagcttcttttcgccgtacgcgccgtaaagccgatgcacggtcaggtccgcgtccgacagcagcgggaacgacaggtggtcgcgctcgcggaaacgctgcagcttgtcgattgggtccttggagacgcccagcacagtgaaaccgagtgcggtgagccgggcaatgttgtcgcggaagtcgcatgcctcggtggtgcagcccggcgtcatcgcggccggatagaagtacagcaccacgcgcttgccctgcgccagcagccgcgacagcgtgacggaggtctcaccgccgtccgggttgaccgcaggcagggtgaaatcaggagcgggctggccgggggtgagtcgcgtgggaagagcgggctggctggattgtccgggctgcggtgattggtcgcttgcgtgattttctgtcatgatgcgtgctcctttacctcgatgcccatgtgtgccaccactatcgccgtcgtggtggacagtcgcgcgaccgcgtatagtcgaatcatgcaatggctgcacaggataggcgaggcgattgattcgctggttgcatggtggcggcgctcgctgatcgggcgggtgattgaccggtatgtgtcgcggcgcgggccgctgctggcgaacgggttggcatatgggctactgttcgcgttcttcgccggcgtatggatcgtggtcagcgcgctcggactggtggtgaccgggagcgaggagatgcagaaggcgctgctcgcgatgctgcgcacggtgattccgagcgtttccgattcgctgttttccgcgtcgatgctgagtggaatctcgcatacgctgacatggaccggtctggtgacgctggcggtgttctggtggacggtcaccggttggatgaattccctgcgcaatgcagtgacgaccatgttcgacgattgcacgcaggagctgaacgtggttaaggcgcgattgcgcgatacggtcgctgcgatcatggtggcggtactgttcatattgtcgaccgcggcgggcgtcgtctctggcggcctgatgagactggtgttgcgggcgcttggcatcgccgatgattcgctgccgggcgcgctgttgctggaatcgaccggtttcgctaccggcgtgttgctgaatttcgcgttgttcatgctgctgctgcgcgtggtcgcgcacatacgcgcgggcaaattcacgctggtgggggcggcgcttggggctctggcggtcgcggtgatgcagctgctgggcgctcgtctgttgacgggtgcgtcgcgcaacccgatgctggcgccgttcgcagctatcatcggcgtgctcatctggttcaacttggtggcgcaggtgattatgatctgcgcggcgttcatcgccgagtgccggcggggggggcggggagagccggagctagctacatccgctgtcagccgacagggtaactggcaccaagcattgccggatacgatatcgtatgagacggctgcgagcttcatcgcaggtcgcaaggtgcatgtctttcatgagatgtgccgtagagcatatgacgagaggagagttcccatggcgattgatgtatatggtgcaacatggtgcggcgactgccaccgtgccaagaacgcgctcgaccggttcggcgccgcttacacgtggcacgacatcgagcaggaggagggcgcggccgaccgtgccgttgagatcagcggccaaaagcacatcccggtcgtgctctatggcgacgggtcgttccaggtcgagccgtccgtcgtggacatccagaacaagctcaaggagcttggcctgctcgggtgagcggtgagtggctgcggcggtggcgaacgatggcgggcggctgatggcgaggtgcggtatcggctgtccgctattgaacacgatgcatcaattcgcgccttatggtcggcgcttttgcaaagtgaggacagcatcgttgcttgatttgaccagattctatccgtaggcagaaagggcacttgcgcccgcagcgcgaacacctgagtgccgccttccggcaccgcagccggaccaccagcgcgggagcgggacgcaacggggaatcgtccaccgacacgtcctcgacgaccatgcctttgacgttcagcaatcgtttgaattagctcttcaacgaaggcgctttcttcggttgtatttcttggtcgaatgtagtattgaattcgcatgatatggaagcgcggttgtctctgacgtctccacgggataaggagcttcggcctgacggcctccgcgccgttatatccatgtcgatgggcgaatcgacgtgtcggcgcataaggacatagggaagagtaatgacgaagccatcagagggagtggaaaccatggatgacgccactccagaggagagcaagcccaagggtattaagcccgccaacctcaccgccatcatcatcgcggcggtggccgtggcgctgtcgggcatcggcggcggctacgcctactggacgcaccacgaatcgaccggataccacgcggcggtcgaacaggccgggaaggccgacaaggcgctcatgaaggccgtggacgaggccaccgccaccacatacaaggcggatcagctcaaggagccgaagctgctggacaagctcgacgacgccatcgggaaggcgaaggcgctcaagggcgtccccgaggaccagccgggcgagtggctggcgtggcagctcgcttccgcgaaggctgccagtttcaaacgacgaacaacatgccgatgacactgaggtgaccgttcgggaatatacccatgaatagcgacgcaagatgtgaaagcggttggatgaattgtttcgaagcaacggtggaatctgctgatgtagattgaagtcgttcctccgcggaaactcttggaaagtacaaaaatgagacagaggtagatgtcccaagacgattagtcggaagaccgatggtcggcatgtcggtacgtgcccactggtaaacttcatacgctggtctgtaggcatgtgccgcttattggaacatctgctacttgtgtgagcttatgacgcctgtgcctatagcggacctacatgtgaggagcagtcatgaagtgcgtgaaggcaggtgaaatgcgttgactcttacgccatcatccgacctgatttccattgacttgtttgctggcgctggaggtctttcggaaggccttgaggaggctgggtttcacacccttttcgcctcggagattgttccccaatatgcagagacctacgctaggaatcatcccagcgctaaggtatgtgttgaagatatccgtaaaactgacccggagcgcgttcgccgggaattgggcctagagaaaggtcaacttgatttagtggctggtggcccgccctgccaagggttctccattaatgcgcctgttcgttccaatgaggatccccgcaaccatttgttccgtgaatatctacgctatgtggatgcctttcagccgcgtgcaattctaatcgagaacgtgccgggactcgtctcttttgagcacggcggaactttgcatgcgattctcgatgcattggcagatctcggttacggtgctgatgtgcatattctgggtgccccttactacggtgtgccacagatgcgttggcgtactatcattcttggccttcgtggcgcggttataccgcaatccgcttggcctgaacccactcgtcatgctcctgtgcgagcgaacttcactaccacttttgatgggcgacaaattgttaagcagcctagccccgaaacagatgcgccattcactacgcttcgtgaagccattggagatttgccttcattacagaacggtgaacgcggcgaagcggtcaaagaatacccggtaaggccgcagtgtgattatcagcgtgcgcttaggcgcggctccataggtgttctgaaccatgaagctcctagactctctgcaattaacatgcagcgcctaaactacattcagcaggggggaaattggacagacattccggatgaattattgccaaaaggcatgcgtaaagctaggaaatctgatcacacaaagcgttatggacgtcctatgtgggatgggttatcttccacgatcctcaccaagtgcgacccccactggggtgcttttttccaccctgaccagaacagggcatttacagttagagaagcagcgcgtattcaatcctttcctgaccactatgtatttacaggttctcaggctgaacaatatgcgcaggtaggcaatgcagtgccgccactacttgctcttgctgtaggtacgtcgttatcagcagtgctaaaggaggcatgaacatggccggaacaatagttgacttcttcggatacctctcaacagataaaacggatgcggcaaaattggcatctgcacgtagacagtgtccttttctaggcaaacaatgtactaagcctgtagcggaagatgatgctggtggtatcagcggagcctgcgctgtagcgcagattaaggacgcaacacctactatttgttgtcctattcgtctatatgcagacgattacaaaatgcttaagattattgcatataagtctttcggggttgatctcaacctttattctggtaagaataagctcgctctctacaaagcgaaagaagaaggtggtgcagtcgccgtatatggacacgactggggcggtgaattaaagcttccaaaacgtgatggggttgggaattactttgttgattggattctcgcccgtctcgacggagaaggcaatttggtggagttcactgctattgaggtgcagactatcgataccacggggaattatcgtttgtctcgtcttgcgttatttgagccagaacgtcgaatcgttaaatccacagtgggcttgaactgggagaacgttaataaacgaattattcctcagattgtctacaaagggcaagtgttgcaacgtgaacgtcttaataagacgggtctttggtttgtcactcccgttcccgtttatgaccgcattatgaggcgacttggaggagagcacaatctttctttcggttttccctcacagcccggagccatccacttcctgcgctatgactacgatttcgataaagctgtggagggcaggcctgttccgcttaaagttgctggagagggttgcacaactgttgaaaaagtgtctgccgctttctcaaatgttggtttgccggagcctaatgtttatgaggctgctattagaacagctttgtacgattaatacccgtggtgatcagggactgctgctttgtattgaggcgttcaaaagtacaggatgaaggttctattcgtaaagatctgagttaatgtagcggaattggtggattcctacttaagaggccataaagccaactggtgccgaatgagttgcgttcttgcgctgttgcagctctggtgaaggctattttaggtggaatgccgtgaatggcgatacgggcagtaaaacactcatggggcggcggaaaaggagtgtggtacgagctgaatcgggctgaatcgagccgaatccggcccgtgggtgcgcgatggcgacaaaaacgattcaagggtaaggcggaagagggaacggcggccagccgggcgcgtgcgcgaccggggcgaaggggagccgccggaacgccgcctcacgcctttgcctatcgccggtagaacctgggcttgtacgcgggcaggacggctttgtggtctttttccgccccgtgggccaggaggatcgtcgccttccccattttcagtcgcatctcgttcaaggccagcagcatccgggctcctctgcctcggcggtctttcccgccgacaagcaggattaccgtatccgcgcttgtgatctcaagcattctttcatactcgtcaaggctggtcacgcgggtatccctcagcagctcccgcagggacggaatacccgtctgcggggttcgcggctccgcgtttttgatggcccgcagcttgcggaagaatgattcgacgacgctgatgtattccttggccgtccgtatgcgcgacaccgttttgccgcccacccacgccgccgccgtcaattcgttccgaatgtcgcgcgcctccttcttggtgggcagcccgatgatgcgcgacctgtccggggccttttccgggccggatagggaatcgtataccttggcgagtgttttcctgcctttgcggcggatggggtccgggctcatgtcttctccttggccggtcatggcggtgccggtgccgttcgctggcgaatacccgggggagggatgccggcggggtttgccggtttctccttcggacccatccgaccgacggacgttcctcggcttcttgtctatgtatgaaggagttgattgacggttcgaatggactttcatggcacccgtatgcgttcgtgtggcgtttgtcggagggggtccggggggaccttcgcgctgggccgaccggtattcgctgcgatgcgcttgcgatacggaggctgggattgttgcgaaccaaaacgaaaaaaactgcgcggagcacacacggggaacgacaccatgggcgctgcgcccgtccccgccagcccatcaccctccacccgcgacgaggttgcgcgaagcgaaaaccttcccgaaccatatcgcggcccgagtcgcgccatagttgcaccacaagtcagaccaccagcgcgaccggcccgcgaaaacggcggttttccaacgcccccataagaaaaagataggcgggaagaatagaacaacatgatcgaacggctcaaacgcgagatcaggcggcgcactcgcgtcgtgggaagcttcccggacgggaacggcgcgctcatgctcgtctgtgcgcgcatcaggtacgtcaccgcgaacgaatggtccaaccggcgttacctcgacatgtcccggctcggtgacaatctgcaggaagcgaaccggtcatcgcgccatgggcgggcatgatccaaagtgcgcaacctttcgggcactacctcccaaaacctccactgaacggaaaaatcaagccacaacagacactgtcaaacaggcttacacaccttgaagcatgaaaaaagccatcagggacttcctgatggctggtcatttgcggtatgcgctccacttattccttgggcatcggcctgaggccgccaacgacagcgctcttcacataggatgtcactataacagtccgaatattgtgcatcaatcgtttcccatatgtcaccagaatcaaaagcacaccccggaagctatccagaagacagcaacagaggtgcccctaacactattgcgcatcacttggtcaaagtcattgatctgacaggcatctgaaacccagcaggccaagttaagcggcgtgagtttgtggtcaaagtcattgatctgacaggcatctgaaaccaaaacacaaccgcgcagacgttccaatgtgtggtcaaagtcattgatctgacaggcatctgaaactgttgttcctttcgtggggggggggatggtggtcaaagtcattgatctgacaggcatctgaaaccaatatcaccactgaccggagtcaacgcaagtggtcaaagtcattgatctgacaggcatctgaaacaccagagcggacatgtgcggagcagacctggtggtcaaagtcattgatctgacaggcatctgaaacgcgtcaacgagtgagaaatcggaatcaacagtggtcaaagtcattgatctgacaggcatcttgaatatttgactcgttggggtccggggttattgcgtttgggggccattatgagttttggtggttattgcgtttcgaggccggggttattgcgtttgggagccgtggttggttaggctcctttcaccatgcgagggacgtgtggtgaaaggagttaccagcaatggtacgaaaaatacaggcgaaactggtgctgcgtttgcatgcccagggtttgtcggggcgtgcgatcgcgaggtcgcagggcatgtcgcgccggagcgtttccgatgtgctcgatgcggcgagggccgtcggcgtcggctgggatgatgtcaccggcaagaccgacggcgaggtgtacgccctgttgtttcccggtcggggtgagcgcgaaagcgtgtacgagcagcccgactgggccagggttcatcgcgagctggcgcgtgtgggcgtgacgttgaggatcctgcacggcgaatacgtggacggatgccgacggaccgggaaaccccatatgggttacgaccggttctgcaagctgtacgccgcatacgtgcagaagttgggcgtgacgagcagggtggagcacaaggccggccgcaccatcgaggtcgactgggccggcaagaccttgcggatcgtggatccggtcaccggggattcgtcaacggcgtatctgttcgtggccgtgctgccgttcagccggtatgcgttcgtggaacccacgctcgacatggcgcagaactcgtggctgcgggcccatgtggcgatgtacgagtggttcggcggttccacgccccgcctggtgtgtgacaatccgaagaccggcgtcatcgcgcatccgcgcgagggcgaggtcgtgttgaacgacgcgtaccggggtttggccgagcactattcggccgccgtgctgcccggacgggtcaggaagccgaaggacaagccctcggcggagaacaccgtatggcacgccacgatggcgttggccggcgcgatgcgcgaccaccagttcggctcgttggacgagctgcggaccgcgatacgcgcgtggctcgtggaatacaattcccgcccgttccagaagcgtgacggatcacgtctgtcggtgttcgaaggcgaggagaagccgctgctgatcgcgttgcctccggtggcatacgaggtgatggactgggtgtacagcaggagggttcaggccaacagccacgtcgcctatgctcgcaactggtattccgtcccgtacgcgtacgtcggctccaccgtggacctgaggatcggggcgaacacgctcgagatctggcacaaaaataccaggctctgcacgcaccggctcctgccggcgtcggcctccaacaagtattcgacgaacggggccgaccttcccggcaaaaccatgtggaagccgtgggataggaaacgatgcgagcagtgggcgaacaggatcggacccgactgcgccaccgtcataggcaaactgttcgccatggaacgtctcgacgaacaggcggtggaccccgcgttggcggtgctgcgcctgtcgaaacggtattccgcgcaacggttggagaacgcgtgctcgctggcgttgcagtcggtcgcctcgccccgctacgcgcatatcgggccgatcctcgaatccggccaggatatcgcgggcgagatccccgacgacgccggcgatcacggcgccgacggcggggatgacggtgccggttgggtgcgcggcggcgactactacgcgaacatgggcaggtgagacgcaatgatcatcgacaccgagaccaaacgcaagctgcgcgagatgaacgccacggacctgctcgacgcgttcgaacgcctcgacgaacaaaccaccatgccattgagccacactgaggtgatcaggctcgccgtcgacagcgcgcactccggtcacatggacgccaggatccaacgcctggtcaaacgcgcgggactgcgctatccccaggcggacctgcggaccatcgacctgatggaggagcgcgggctcgaccggagcgtgatcgcaggcctcgacgccggaaactacctcggccagcggctgaacgtcgtgttccagggagccaccggatcgggcaaatcgcatctattgtgcgcgttggcgaaatccgcgtgcagaggacggtaccgcgccatatacgtgcgcatgcccgacctcgccgaacaggtgacggccgcggccggcaaaccgggaggcgtgcccaagctcgtgcgcaaatactccacctacaacctgctcgccatcgacgaatggctcgtcgacaagcccgacgaaccattcaaacgattcctgctcgagctcatggaactccggtacgacacggccagcaccgcgttcgccacccaactggcgaccaaggaatggcaccgccagcttggaggcgacaccatcgccgacgcgatcctcgaccgcatcgtgcacaacacgatctggattaataccggcgaatacaacatgagacaacgccacggacaaaccatgctcgacaactaacccaaaaggccggtggcccccaaccagtccgccaccggcctccccgcaccataaccccggcctccaaacacaataaccagtggcctcaaaagctacgaatattcacatctgaaacacacgcctatcacgttgtacccgtcaagcagtggtcaaagtcattgatctgacaggcatctgaaacgcgtttccaccggttccgcggctaaagacggtggtcaaagtcattgatctgacaggcatctgaaactcgcacgccctagcgccgctagaatcacgcgtggtcaaagtcattgatctgacaggcatctgaaacgtcagttcacgatggtcgagagagtgctgagtggtcaaagtcattgatctgacaggcatctgaaaccacatgaccagcgcgtgtgcgcatcgtgtagtggtcaaagtcattgatctgacaggcatctgaaacgtgggcagccagctacagaacttcggcatggtggtcaaagtcattgatctgacaggcatctgaaacccctcagtccatcttgccgtctcatacacagtggtcaaagtcattgatctgacaggcatctgaaacaatcatcggagcccagaaaaccaatctcaggtggtcaaagtcattgatctgacaggcatctgaaaccatcacctcaccgtaacgggagcccagcaggtggtcaaagtcattgatctgacaggcatctgaaacactcaccccagcggcggcgatcaccgacttgtggtcaaagtcattgatctgacaggcatctgaaacgcagtccgaaattgttagcggtgcgtcaaagtggtcaaagtcattgatctgacaggcatctgaaacatgatcgcgtttactacgccggttacataggtggtcaaagtcattgatctgacaggcatctgaaacgatattccggctcgatcaacaacaccatctgtggtcaaagtcattgatctgacaggcatctgaaacgtcgtcgtgcattccgaggaaggtgactttgtggtcaaagtcattgatctgacaggcatctgaaacagccgcgtcaatatactcggctcagatcgtgtggtcaaagtcattgatctgacaggcatctgaaacaaataatatcatcctcaaccacgttgccacgtggtcaaagtcattgatctgacaggcatctgaaactccgtgtcggcgcgtgcgatatacatgctggtggtcaaagtcattgatctgacaggcatctgaaactcacaacgatcacattgggggaattgctcggtggtcaaagtcattgatctgacaggcatctgaaacggcatcacacagctttatcgcagtggctaagtggtcaaagtcattgatctgacaggcatctgaaactcaacgtccgtgtaatcctctaattcacctgtggtcaaagtcattgatctgacaggcatctgaaacataatgtgctggacatgcagataatggttgagtggtcaaagtcattgatctgacaggcatctgaaacacgtaagtgcttttctttttctgctgctgtagtggtcaaagtcattgatctgacaggcatctgaaacagcaacgccaccaacacatacgcggatatggtggtcaaagtcattgatctgacaggcatctgaaactgagcatgtatatctgcacgaaacgcaggagtggtcaaagtcattgatctgacaggcatctgaaaccggtcttgttggattcggacgggtcgatgagtggtcaaagtcattgatctgacaggcatctgaaacttaaaccacagcagaaccaagcgcccaaagtggtcaaagtcattgatctgacaggcatctgaaactccaaaagcgcactaatacaagctggtatggtggtcaaagtcattgatctgacaggcatctgaaacaccctctggcatatgatgacgcaaaactctgtggtcaaagtcattgatctgacaggcatctgaaacgatatatgagtggtcaaaccaaatacaacagtggtcaaagtcattgatctgacaggcatctgaaactgccttaagcaacatcctggcagtcgtttcgtggtcaaagtcattgatctgacaggcatctgaaacgcgcatgcttttggcaacctattcgcgattgtggtcaaagtcattgatctgacaggcatctgaaactgtcggcacgttgcgattcgaaccggacttgtggtcaaagtcattgatctgacaggcatctgaaacgtatagaccgtcactcgtccggggtctcgggtggtcaaagtcattgatctgacaggcatctgaaacggctgatcagcaggggagaccagcgcatcggtggtcaaagtcattgatctgacaggcatctgaaaccgatagccttaagaattcctgaacagttcatgagaactgaacgtaatcctcatcgacatagtggctcatcccctctgtcagcatgactttcttgctgcagcattccaggtcaagaagctgcaactggtaccgcaataaagtacggtgcagataaagtaattggtcgttatcacagtattgagttgtatgaagcgtcaccagcatcctgctctcggcaagagcaccggcagtatctactgccgtcgaaattttatcatacaaggatcccaaagaactcgtgtcaatccgaggtttggccattgcaattgctgctttcaaatccaaatcgcagggaatagtcagaggtagattttgaccccatatctcatcttgaataattgtttttaactcagcctgcaaagacaataatctactgatttgctccggcgtaaatccttcgattattttcttgacagcaagcttctggaacaaagcattataatccacttcatccgcgcaatcaccaatataaattatacttttggaagccaaaacagttttttctcccacgccaagtacaacagaatcggcatcttcctgaagtcccgcagataactcataaaaaatttttggagatgcgcatcctataacattcagccccatctcaagttgcacaggatcaagagggtacgcaacaaggctatctatcatataatcacagtcctatcatcactattctgtgcatcatcaatcatcgacccagctaaaaaccgaatagacgagtactgtttttccgtaataatcaacgactgaaccaaaccttcagcaggcgcaaaactagctactctattctccaaaaaatgcgcagactcacgcgtggtcgccactctcacataaaccgactcctgaatcataaggaatccctcacgaatcagatttttcctaaattccgcatatatttttctctcattagcggttttcataggaaggtcaaaaaaaactatcactcgcataactctgtaccgcatcgcacaaaccccaattccggcaagcattcttcaccagaaagataccgaagagcatctctcacaaacacactgataagttgagtaatcgtagtaccaagctcgggcacatcgcttcgcataaatctcatcaattcaactttgactttggaatcaaggtgttcagcacccaattgaaagactctttcatccataaaaggacggaacggctccatcaaatcacaagccaaattaaacggattcttctcgttatcatgatgaattccaaattccgtcagatagccaatttccgttattttcctagccacttcagaaagaataatcgcatacccataatccaaaatcccgtttattccattctcctcatcggaacgaacaaactcatatgtgaataaccgagggaaatacatgtgagccgcaaccgcttcacgattatccgaatctccaggcttcacatccacaacaagtgacttcattttctcaaggtcaagactgtcacaattcttctccagcacagacacttgatgcgcaattttctcacgaataatatgctgccacaacagatctttacgcgcttcatcccaacgtatttgctgaattatgtatgcccgtcgacttgattcagtctcataagggctcgtctcccctattggaagatgcttgtcgtcgcagaatacgattttcacatcgcgtttcaacaaatctgctatcgcacatgtcgtgattaccgcccgtgtcgtttcaatcatcaacataccgatatcgtccatgggcaattggcacacatcatcgtccgtctgaataactagcaatctcatttttgtggaaatcttgcaatgccgagttaccactacattccgccatgccatatacacctcatcgtgctatacttacagaggattgtttggtcgcaatccatgatcaaggtcattgacctgacaggcataaattgaaataaagcaaggtttcgaccaagcttcagaaggttttatacctggccttatggctgtgaggctcccgataatgtcgggagcctcttttcatttgtccgatacttactatttacttctttttttgcctttcttttcaactcccctaccgttactctcttttcaaaaagtcctgacggcgactggaagatgaactcatcttcgtcggaaaatgtatagccagatttgttattcattcgacgccagctacctgtcattcccacaattgacagatttgccgttttcgcatccgcatgtaatgcgctgactatacccgtgatgacattcttcttctcatcttctggaagcttgtcgaaagcaacatgcaagtcagcgagctcctcctcggtgaatctatgccacggatagagacactgtacagagcccagaatcgaatcgagaagcttcttcagatcatctttctccaaagaacctttcccttgagacagatcatcaaaataacagtactcttcatacggcaaccaaagctgctgagcattattcaattcgccagccgacttaatcaccatcagtccaccgccataacggatcaactgcatcttcggcacatgacgtaacagaatgttcgctttcgcatattcactcttcttcttcgccaacacttttcgcagctcatcatcagacggcctatcccctagcagcgaatactcctgcatcgttacattgaccaagcgggtcttcccctttgattcaatcagaaccgcgtaggcaggcttcgcactggagaaacctccataaagggaagtgtcttgcttggcaccatcgaaaggaatacccttaattcctttcggatcagtcgcagcatatcttgtctcatcgtacagcgccccgaaatcgtctccgactttctgggtaacgagcatcttacgataattcatcaccttacgcagataatctttgtcttcctcagaccaaacaacttctccagtacgcggattaactcgcttttgttcatcttgagaacgcatcgagccaacaataaaaccaaacgcacggccttgttttctgtcttctgcgctcagtttctcacgatatccacgcaggtaatcacgcaaatactggttataagaattctgtgcaccgtcagaaacctcaccatccgcaaagaaaccacgattggccgcaaactgtccagcgatgccgacgcacagcgcatcttgcgcgtgatggtaatcgttgatgtcacgattcttatgcgagaatcccaaatatctgtgcatttctttagtcaattccgcattgagaccaatgaccgccgcgctattgccataccgttggcgcatcaacgttgcgacattcttcataatctgccttgtttcaaccagcgaacgctgaacaaaacgttctttctcacgctccgagaattcgttttgacgagtcaatcgctcgaacttaacgcggctgattaatccattgtctaaaagtatctgccagaaattacgcattcggtctgcgatctgaggcatatacgtgaacgaatccgtcttgcgagcgttctcagcacgcgccacgagcactcgattgtcgatcgaatcgttctgcgtcaccgcctggggaataatatggtcaatgtcatacgccgatgaaagcctatcgagatctaattcctcgcccgtgtacatgtcttttccaagctgcgtgtagtacaggaacagacgatcatcctgaagatccttatcactgcacgcattaagctcgtccgcgattcccttgaattccttccccagattcgcattcctgtacaaatcctgtagacggctctttcgagatatcgtccggccacttggctgaatatcatccgccaactccaagaaaattcttgacggccgtttgccaactgccttagaaatatcatcaatcaaacgaatcgactgaataattcctcgttttacctttggtgagaccctcaaatcatcaacgacttccataagagaactaccgttttctgcaccaaggttttcttgctcaatccaatcagaaaaacctaattgcttgtcggtaatgatctccattaaattacggtcttcagcacgcataatttcaataatgctgtgtttacgcggcgcgaaatcatcactaatcttgcactcaccagcttttgttgtcagcaatttgcgagacaaacgcccccaaccagtgtaatgagtgtttacgagcaaagcgcagtccgcttccgaaatgccttcaagctgccgcaactgatgcaagagcgtttctttatcttcaaatacagtctgcagctcaacgatcttttccatcaaatcgcgatgctcattcacgtatttctcgccgaatattctacacatcttgccatacgttgacaatgaactcgtaaatttcgattcatccgacaagccagacaactcgtatgtacgtccatattctttgcgcaaaagattttccgcagtcctctttgtaacagtctgccctttcatgaaaagacgctgacacagaagagttttttcttcacggccaagacgcattctgcgcttatcattccaatgatttccagtgcgcacagacaagcgaacattgttgagctcattcagaacctcatactcctgatacaacagggagttcttcggcagcgtcggctcacccaataagtagctatcagtacccaccaatcgttcaatgaactttcgaccagaggcgtccttgtcgaccatctcatcgaaattccacggcgtgatttcacccttcttctttcttaccatccaatggttttcactattatcagatttctgaagatcttcaggcacaaccaaaggaccaacaaaatagggcacacggaaagccaataacccttcaattttattaatctgctttccgtctttttcaaaagcatcaagcaagaaaggataatactttccctgtttcttgataatttgtttcagctcattttggtgcagctgatgcggaataactccattatctgaatctcgttgaatcggaaaaagtttatcttcttcaatatcatgaatcagtctgtttttatccgtttccgaaagatcagacgtttcaatcatctttttgaaaaagacattggctttctttcgcatattctcatacgcgctttcgccacgtacacttttacgttggccactatctattttccagccaactagaatgccatagttctcgtttatgtctttctcattctctttcgtacgcaattgcaatttaattagattccaattggcgcgatgagcatcataacttgcgcattttgaatcggaaacactcgtagaccttcctaacaactgtttcagagcgattgcgttgtactgcccctgcatgcgatccaagaattcgcgttcctcatcatcaagaagtcccgaatctacaatctgaacacacttctcttcatagtcagacttattgaaataaataccaagtatcttcttattttcagaagaaaactctttgctgacgaatattttcgcgagatcaagtttattaccttcaagtccagcaaaaatagccttgacaatagctctttgttcacgagacaaatcgtttacagcactaagcgcttcaagcgcattatcgactcgcatggagcgcgagccgcgcgttgcgcacaaagcatcagctaactggccattggcaggcgcaaccaacttgttctcatcatcttgctcaatatcgctgttttgctcaccttccgacatttcataacgggtgattcttccaagaagtttcagcagctcatcttctttgaacgcattcgacgattccagggttccctcaaccagaaaattaccgcgatatttcaccatatgatgaatggcaagatagatttctctaatatcatgctgagagtcatcttccattaatgctttgcgcaggtgataaatagttgggtatttctcataaaaacgtttgtcctgttcgtttgaatcaaacagaacactaccgtaccaacaatccgcattgttttcatcatcaggatggacccaagaatacttcctacgagccaaaaatgaaggatcaatttcagacaacgcctggtcaaacaaagcatcaagaagacggaggcgccaacgcctgcgcgagtaccttctgcgtgtggtacgtgccattcggcgagattcagccgtatcagccggatcgaaaagtcgcacgccaatgagttcatgcccctttgcacgtacaagccgataattcggggtgaaggccgaccagccaacggatgcgtttccgatatccaacgaaattgcataatcatcgacataattcttgcggctcataagacctccatcggtatcagaaatgcttaggtacagcctataccaccattcccctcaagctatgcgcaacacactctattacagaccactccagcgtctggattctcccaccgaccggaaaaatcctctcgttcaaagccttctcagcgggcaaatccttccagtcactggaacattcttcccgcaaacatgcctccaaaagtcccgattcttccagccattggaggaatcgtcccgatcaaaacccgctcagcgacccaaaacatccagtcaatggaggaatcaccctgcttacagacccctttgcgtcctgattcttacagcgactggaggaatcaggacgcaaaaggctattgatttgacggttcggatggactttcatggcacccgtatgcgttcgtgtggcgttcatcggagggggtcagggggaaccttcacgctgggccgaccaccggtattcgctgcgatgcgcttgcgatacggaggctgggattgttgcgaaccaaaacgaaaaaactgcgcggagaacatgaagggattcgaatcggcccactgacgggacgcgtggggcggggtcgggcttcgatggcggacacgcggcgggcgaaggctcgaaggcgttttcggaatcgtcggttccgatatgtgacacgcgcggcaggtcggggccgaaggtgtcgacacggagggaacctggagggaaccgacaatcggaaggaaccaaagcaaaaccccggaaaccgaatgttttcaacggtttccggggttccaatccgggcggaggatacgagattctgtgcagaatgcgagaaaagccttattttccgccagttttcgagactgcaaggtgacgacgccacggtaattcccactgtttatacgggccaacatgtcccttctagtagtgctacagttaattccacgatcattccgattgtcgtctgcatgacgttaaagcaattacccatggcaaggtctgccttgcaggaaggaagattatcatgtcagcaacggtcgctccttggaatttggaacctatctccgtgactattgccgaggccacccgtcttctaggcttcaaagactccaaaactgtctacaacctcatttatcagggaaagatcaaagcccgcaaggtcgggcgagtatatcttgtctcctacgcgtccctcaaaaaactcattgaaggctaagtatccgtacttggaaaacgtgaggtcacgtcaacgggaattgacacgacctcaaagaatccatgttcatgcgcgctgctgtttgcaaaccggcgcgagataaaaaggacccttacaatgcttcattatagcgatgcgcgcccggagaggggcgaattcatcggggacggcatagcaagaaccgcgggaaacatcccgtacaatccggaatccgatgacaacgcgtcatttcctgacgacgaattctggaattcgagggagagcctgcaacagatcaaagattatgcggtcagcaggttcgtttccccctacgcggtgctcgccgtgacgctctgccgcatcatcgtggcgacgccgccccatgtggtgctgccacccaccattggcgcggattacggatcgttgaatttcggcgtggtgattcttggtaatccgggctcgggcaaggatgcggcctttggcgcagcgaaggcactggtgccggacattcgtgacgccccagtgaccagcgtggccagcgggcaggccatcagcgcgttattcggccagcgtgtgcaggacgacggcagattcagactggaatgcaagactcctcgcgcgatgatcaggtattccgaggcgtccaatttcaaggcgctgtcaagcgcgaaggaaagcaacctccaggcggaggtgctgtcgctgttctccggccagcagatcggcgactacaccaagaacaaggagctgtccgtgaccattccggaacacgggtatagaacggctgtggtgatttccgcccagccgtcgatgatgggcatgttcgaggttggcgtcggtgtgggattccagcagcggttcctgtacgtctccgcgtacagcgacaggctcaatgtccgcgcccttgacgaggatccggtcgcgctgtcatcgttgacgagatttccctacgacaccggtctgctgcccgttgactatcccatcgagcagatgaaccggctctacgagtgcggcagctatgcaaaggccaatgactccacgccggattccagccatctggagaagcgccccatgcgtctgccgccgatagcgatagccgaaatgagagccgacaaaatacgggtcaacagggagcatggcggcgatccgcgccgggcccacggcatgttcctgcgtgccaaactgtcggcggccttccgcttgcttgaagacccgctgtcatccgaaatcatgcaggaggactgggaactcgcgggcatgatgatgcgttactcgcgtcgatgctacgaggaaaacctgcaagagtataggaatgagaacctcaaacgacgcgcggactataaagaggaggacgagctggtccgcgaacaggtcgatatgcgttcccagctcgccaccgaggagcgcatcatggaggtgctgtccaactcgccgaagccatccgtgtccaaaggggaattgacccgttccctgtccaaaagacagaaagccagtctggatgccgctctggagaacctgatggcttcaggaaagatcaaacacaggaagggcatgaagggcggccactggtattcgcttgcgtgagcgacctaccgacctacccgcctactcactactgccgtaaggttttccgcgacctaccgacccgagcctaccgacctacctacgggaatccaaggtaggtcggtaggcgagctcagtaggcgaccaaatcccagtgattccaccaggtaggtcggtaggttggtaggtttttgggaatagaccaattctgaccgacgattaaaccccggctatcgaaactggaacatgggaaagccatgaccctcagcatgacgcacagtgtgggtgtcgtctgcttctactggtgtgtgaatctgcgtacttggtattgttgaaggctatatctacggttctgaagaaggtatggcatgatgaatagcggagcgcagcgcgcggagttgcacaaaacgatttggagtatcgccaatgtgctgcgcggctcagtggacggctgggatttcaaacagtatgtgttgggattcctgttctaccggttcatctccgaggacatcacctcatacctgaacgagtacgagcaccaggccggcgatgtggattttgactacgccaagctggacgatgccacggccgagcaggtacgtaagtcgatggtggaggagaagggctatttcatcctcccgtccgacttgttcgccaacgtgcgcagatgtgccgatgcggacgagaacctgaacgagacgctgcaacgagtgttcaagaacatcgagggctcagccatcggctcgcgttcggaatccagtctgcgcggcctgttcgacgatttggacctgaacagccgcaagctcggcgacaccgtggtggatcgcaacaccaagctggtgaaggtgctcaacgccatcggcgatctggacctgggcacggagagcttcgcggacaacacaattgatgcgttcggtgatgcgtatgagtatctgatgaccatgtacgcggcgaacgccggcaagtccggtggcgagttcttcacgccgcaggaggtcagcgagctgctgaccagaatcgccacccatggcaagagcgaagtgaacaaggtctacgacccggcgtgcggttccggttccctgctgctgcaatccatcaaggtgctgggcaaggataaggtccggcaagggtttttcggccaggagaagaacctgaccacgtacaacctgtgccgcatcaacatgttcctgcacgatgtgaactacgaccatttcaacattgcctacggcgacacgctgatcaatcctcagcattgggatgacgaaccgttcgaggtgatcgtgtccaacccgccctactccaccaagtgggagggcgacgacaaccccacactgatcaacgatccgcgatttgccccggctggcgtgcttgcgccgaagtcgaaggccgatctggcgttcaccatgcacatgctctcctggctggcggccgacggtaccgcggccatcgtcgagtttcccggcgtgctctaccgcggcggcaaggagcagaaaatccgcaaatacctgctggagggcaacttcatcgacgcggtgatccagctgccgccgaacctgttcttcggcacctccatcgccacctgcatcatcgtgctcaagaaatcgaagaacgacgacagcgtgctgttcatcgacgcgtcggaacggtttgtacacgtcggcaaccaaaaccagctttcacccgacgacatcgccgcaatcatggatgcttatgtgaaacgcgaaccggttgagcatttctccgccgtcgcctcgcttgaggacatccgtaagaacgattacgtgttgtcggtcagcagttacgtacaacccaaagacacgagagagaagatcgacatcgccgcactcaaccggcagatctccgacatcgtggcacgagagagcgaactccgcactcagatcgacgccatcgtcgcggatttggagagctgaaatggttgaagcgtttcaggcacagggctattttggtaggacacagtatcttcccgaaatccctgtggcatgcagtcgagagttcgacttctatcgctgcgttgaattcagtcactcgatgtacgggaaaacagttagcgaattgcatgcggggaatctgagattgccttccggcgggcgctatagtagcgtattcggcaatcagcgcttgtcttattggtcgagcagtgcggaaacggcaaaagctgaaattagaaaacatggcgcttcgtctgatgtgattctgttcaaagcgtacgatgatgcgaccagcacatggcctaccttgatggatcaagaaccactggttcttgtggatgctcgtgatttcgagatacaagcgataatcgacaaggtcgataacgctgcgccgctaaacaagactgaattggaattgcttaggatgatcaaggcccaggatcctgattgtcttgtctataagtcccatgcccgcgccggtggggagaattaccttttttatgaaaaaggattcaataagttagcacttcgcgaagtccgattatcgctgaatggcggaaggaaccgaaattctgttgcttgcgccgtgtcatctgactatttgccagtactggaagcatacggatgctatttcagtcctattgcgcgtataggcaaggacttaacgtacccagagtcctcggaatacagaatgaggaaacagtacatggaactatccttcagccagtatcgggagcatgagcatgagcaggattgacgatttgattgcggaatattgtcctgatggggtgaaacaccaaacgttgggcgaaataggtgagtttattcgaggtaatggcattcagaagagggattttcgagattctggattcgggtgcatccattatggacagatttatacctattatggcttatttgctgatcatacgaagtcgttcattgacccaaacttggctgaaaaacgaaagaaagcatataaaggcgatctggttatagctacgacaagtgaaaacgaagaagatgtttgtaaggcatgcgcatggctaggcgaagagccgattgctattagcggtgacgcctatattttccggcatcatcaaaatccaaaatatatatcttattgcttccaatcggagctgttccagtcacagaaaaagaaatatataactggtacaaaagtgctacgtgtaaatggcgatgcaatggccaaaatccatgttcccgttcctccattgccggtgcaggaggagatcgttcggattttggattcgtttagctcgctggaggcggagctggaggcggagctggaggcggagctggaggcgcggaggaagcagtatgcctattatcgcaatgaactcctcacattcgagagagtcgtaaccgtttgtattcaggatatctgcatccgaatctgttcaggaggaacgccatcatcaaagcgtcatgattactatgatgggaatgtcccatggttgaggactcaggatattgatttcaatgttattaatcaaacttcagccaccatttcagatgaaggattgagaaattcggctgcccagtggataccggccaattgtgtgattgtggcaatgtatggggcaacggcagcaaaggtagcagtgaacagcattcccctaacaaccaatcaagcatgttgtaacttgcagattgacgagaccaaagctgatgtccgatatgtgttccactggctttccaatgagtatgaacatctaaaggcattgggtgagggctcacaatcgaatattaatgctaagaaggtgaagtcgtatcccattagtttgccgccgcttgaagagcaacgccgaattgtctccatcctggatcgttttgacaagctcaccaatgacctaagttccggcctgcccgccgagatcgaggcccgtcgcaagcagtacgagtattaccgggaccgcctgctgtcattcgacgaacttgccgtgtgacgtttcatcgtgggaacggtcgagttgatgtatggtcaggtgccggaccatagggatgcatagcatggttgggacgcgccgcagacttttcaaaatgtgaggacacgactaacatggcagataacagcagctccctaagcctactcacagtgctcaaaccagggggctcttctcatatcggggcggaatccaagcccgcgaagaccatcgaccagatgatcgccctgatgtcggagcgaggcctggtgatcacggatgaagcagagctgcggcaggtgctcttcgactgcaactattaccgtctctcgggatacttccgttcctttcaagtcaacccagcggccggcgacaacaggtacaggccgggcactcgggacgttgatttccttgttccctatgcgatggacgagaagctgcgcaacatcatcctcaaaggcaccgcgaaagtggaactcaccctgcgttcgagaatcgcatacctgctggcgtcagacggcaacgcctacacgtatatggatcccgaatcctatcaggatgtgcgcagcaaacgcggcgaactgttgcgtgacaatctgctgcgcaacatggacaaatggatgaagatgtccaacgaggtatgcatgcggcattaccggcgcaaaggcggaccggtgcccgtgtgggcggccgtcgagacgttcccgttcgatacgctttcccgaatgctttccctgcacacggatgccaaggcgctcagggaattgtacagatcagtcggattacgcaccaatctgcggacttcctcggaggtcgtgcatgccatggtttatctgcgcaatctgtgctcgcatcatgccagactgtggcatcgggagatggtcatcccgtcgcctatgacgcgtgacatgaaaaccgcgttcgctgatttcgaatacggcgagaaatccgtggcgtcgtcgctgcttgcgctcatgtatcttgtgcggaatatcgagggcgacgatggctacgccatggtgattcgtcgcttcctcgactcgaatgaggcatacgcctctggaatcaggacggccctgcattgggaataagccgcaggatccaggaatcccatatgcgctgcggaatccgaattcctttgagtaggatggcggataaatacggatgaagaaggagcccatgatgacggagcggtcggatatggatctgccggatggcggcaagtcgtacaagctcgtggccgagggcgcggaaagcaccgtggtggccgaatacgagcctgaccacggtcgtgagaccgcataccagagcgaagcggatctggaggaggggctgctgcgaatcctcgaatcccagggctatgaacgactttccgcgcatacggaactcgagcttatcgcaaacctgcgcacccagcttgagaagctgaacgatgtccggttcaccgacaatgagtggtcgcatttcttccacgaggtcatcgcctcttcgacggcgggcatcgaggacaagacccggctgatccaggaagacaacatccagattctgaaccgtgatgatggcacgacgaagaacattcgtctcatcgacaaagtgcatgttcacagcaaccgcctccaggtgcttcaccagttcgaggaggagggaggcagccacccgacccggtatgatgtgacgattttggtcaacggcctgccgttggtgcagatcgagctaaagcgacggggcgtggcgatcaaggaggcgttcaaccagatcaaccgttaccagcgtgacagcttctgggccggatcgggactctatgagtacgcccagatcttcatcatctcgaacggcacgcacaccaagtactacagcaacaccacgcgcttcaagcacatccatgaaatggagggccgtcccgcaacaggccgttcgcagaagagctccgacagtttcgaattcaccagctggtgggccgacgggcgcaaccacgtcatcgccgacctgacgggtttcgccagaaccttcctcgcccggcatgcattgctcaatatcctgacgcgatattgcgtgttcaccgccgagcatgacctgctggtgatgcgcccgtaccagatcgcggccaccgaacgcattctcaaccgcattctcatcagtgaatacgatccgaagaagctcggcacgcccgaggcgggtggatacgtgtggcataccacaggcagcggcaagacgctgacaagtttcaagacggcgcagctcgccagcaacatggatggcgtcgacaaggtgctgttcgtcgtggaccgcaaggacctcgactaccagaccatcaaggaatacgaacgtttcaaaaagggcgcggtcaactccaacaagagcaccaaggtgcttgccgatcagctcgccagccccgacgcgaagatcatcgtcaccacgattcagaagctttcctcatttatccgcggcaatcccaagcactatgtctacgcgcagcatgtggtgctgattttcgacgaatgtcatcgcagccagttcggagagatgcataccgccatcaccaagcatttcaagaactatcatctgttcgggttcaccggtactcccatcttcgccgtgaacgcgaaaaccggtggctcccccgacctgcgcaccaccggacaggcgttcggcgactgtctgcactcatacacggtggtagatgcgatcaaggacggcaacgtgctgccgttccgcatcggctacgtggatacggtgcgccgtaaggaagacgtcagggatgagcaggtgtatggcatcgacgcagccaaggcgctgagcgatccgcggcgcgtgagcgcggtcgcgtcgtatgtgctcgaccatttcgaccagaaaaccaagcggcaatccagttacatgctcaaggaacgacgcgtccgcggcttcaattcgctgtttgcggctgattccatcggcatggccaagcagtattacaccgagttccagcgccagcaggccgagcgcggtggggaaccgttgaaaatcgccttgatctacagtttcgcgccgaacgaggccgatcccggcgagcagggcttcattgatgacgaggacttcgagaccgctggccttgaccagtcatcgcgggatttcctcgacgccgcgatctgcgattacaaccgaatgttcggcagcagcttcagcacggcacccgaccagttcgagaactattacaaggatctgtgcctcaggctcaagaaccgcgacctggatatgtccatcgtggtgaacatgctgcttaccggcttcgacgccacgacgctcaacaccctgtgggtggacaagaacctgaagcagcatggcctgatgcaggcgttcagccgcaccaaccgcatcctgaactcggtgaagaccttcggcaacatcgtctgtttccgtgatctgcggcaggaggtggatgacgccttggctctgttcggggacaaggacgccaagggcacggtggtgcttaagccatatgcggaatatctcgctgcatacaccgagaaggtctcgcagctgctcaagcagttccccttgggcgaggaaatcgtcggagaacaggcgcagaaggatttcctcaccctattcggctcgattctgcggctgcgcaacatcctgcaggctttcgacgatttctccaatgatgatgtgctgagtctgcgcgacctgcaggactaccagagcctgtacatcgacctctaccaacagcggcgttcgcatgaggaagccgacaaggaaatcatcaacgacgacgttgtcttcgaagccgaactggtaaaacagatcgaggtgaacatcgattacatcctcgaactcgtagccaaataccatgacgggcatatggaggacaagtcgatcctcgcggacatcagccgcaccatcatgtcttcgcccgacctgcgcagcaaaaaggacctcatcgactcgttcgtcgagtccctgtcctcaggcacggacgtgcagcgcgactggaaggaatacatcgtccgcaagaagcaggaggagttcgagcgcattgtcagcgaggagcacctgaagacgggactggccgagcagttcatcatcgactgcttcaaggaaggctatgtcgacacggacggcaccagaatagtgtcgatgctgccccctgtgtcacgcttcgcgccgagcaacgcgtacgagctgatgaagagccgagtcgtcgaacggttccgccaatacttcgatcgcttcgtcggaatgtgagggaacggccgtcccaggggccgaaacggaatgaggacaccggggaccatacttttggcaatcggggctccgcagaaaaatctgcggagccccgattgccgtctaaaccagcagcttgtccaacgtccaaactggtctccgctgtcttgatggatgatgaatatgcaacaggttgttgccgctaaagctgatgacgtaaggagcggagcaatgagcgcgatcatccctcaaggaatcccacggccgcatcatgcggaaccatcccagatccctggaacggatacggggatagcaagcgacgcatgtgtggccacacatgctcgctccacagacgtggggcggcttgccgggagacccggaccccatggtcggcaaggcctccggaccgctgacgcggcttatggaatgaaccgttccggctcccgtggggaggtgtttccttatgggctggcgtgacaatcgcaggcgcagcatatgcaggaaaatcatgttcacgccggaggaatgggaacaggcgaggaggatccacgagcgttgggcaaggaacattccggtgtataggcggtggggtgatttcgcccgtcagaccctcatgcatggagcgttgatgaatgtctcggtgacgctggcgagcgatccggaggtgttcaaggccgagctccaccacatcggcgtgaacgtgaaccagatcgccaggatcgcgaatctgacgggctccgtgagtccgcaacagatgcgtgagctgcatgatctgctcgccttgatcgatgagaggatgacggggatggagcgcgagaaagcggagatagatgcggtacaggggctgtactgatggccgtggtcaaacttgggaacaaggtcaagacgaatcttccggacacgattcgttacgtcatcaatcccgagaagaacgatggcggcaggctcgtatacgcgagctacagcagtgagcggcatgacgcgaacacgctcgccgaaccgatgatccgggatctggaacgatgcgcgaatgggctgcgcaaggatggcgtgctcgccctgcatctgaagcattcgttcagtcccgacgagcatgtgagcgcggaacaggtgcatgagctgggcgtcatgctgaccgaggcgatcacgggcggcgactacaagtatgtggtctccacgcacatggatcggcatcacctgcacaaccacatcgtcatctgcgcggcgaaccggaggacgggaaggaagatgcgtctgactcgcagaagcatcgaccggtggcgcgcggtcagcgacgagctatgccgtcgtgagggccttgccgtattggagaacccgaaggttgaaaccgccgtggaacacgatgagatgctcaaagcgatgcggcatgcgcccgaccagagcagcgggcggcagttcggagtcgagtcccctgtcatcgcgtccacgggcgtgggcgcggacatgggcgaactgtatgcggcggcgaggggcgtgggcgtcaaagagcggctgcgcatcctgatcgatctcgatgcggccagggcgaacagcatcggagagctcgccgaactgctcgactcgcacggcgtcggattgacgttgcacggtggcggcgtgaccttcatggacagggccacgggccgtagattccgtggcgcgcgtctcggcccggcgtattcgctcgacgcactcggcatgcggctctcggacggtggaagcatgctgcatctgacgttcaacaaccgtctcgtggccgccgtgaacgatcgtttcgtaagcgtgtggctgcccggaaccaaacggcggaggaaggtcaatctgcccgtgagcatgctgcgccgcgatggcagcacatgtcatctactcatgcccgcaacgttcaccggcatgctcatggaccagtcgaacaggtacgcggcccgtttcgacaccggcacgctgtcggaggcgttcggccacccgaggcagcgcgtcgaatcgttggcaggagacgattccacgatgcccagacgttatgcggcgagtcccgcgcagtaccgctactaccaagtgcaggcaaggaaactcgacgagctgaggacgatggccgaggggttgaacgcggcgtgcagactccagcgagagaacggtggcggcctggccaagggactgcgtgacttaaacgccaaggccgactgggcatacggcgaactacgtgccgcggtcgtcgcgctgaacgacgtgatcgacagccatgaccccgatcttgtggtggaagcgcgtgaggagatcgaacgtcgcgagcgaacgctgcttgaatgccggagacaactcgacgccatcagatcagtcgcccgtaattccggagtcggactgcccaaatggatatgcaaggaacggaacgatgaaccagccaacgaacatgaacagcggaatggaatccgatccgatgggcggcatgttctcccagatgttcgatcggatgcagccgatggagccggagaacaccatgccggcgtcggaggccgatacgattcgggcggaggaagagagccggaggctcaaccggcaggttgcggaacttcggagcgagaattcgacgctctcatcacagaatcaagagcttcaatcaacgaatcggcggctcttgtcggcgaatcagacgctcaggaagcaactctccgaagtcaacgagacggccagattgctcaaagagaccaggaagagagaacgcgcgtgcatagaaagggaaaaacgttgtgaccgcattctccgtcgcgaggcggttcttgaagccgacgaatccagagttcgggatgaacgcgaacgtcttaaaaacgagcggaagcggatacgtgaggacatcgccgaacaagtcgaacgggaatcggagcggatgcgtcgatgtcttaaggagagcagcgacaggcagcgtgagcgtgacaggcgcatcctctttgccttgtgcctgggcgtgtgctcgtccatggtgccgatgctcgctgtcgtcatgcaaggccgctggcaaaccttcgccgactcattgttcgactggcttcatatgcgcgggaagcagctcacggcggtcggccaatggcttgcgggcatcaatgcgcggctgaatgagatcatccccagcggatggtgggatcggccactcgtgtttctgctcatgctgctgttggcagccgtggtctgcggcatgcctctgctcgcggcaggcggatacgtgatggtggtttttacgacgatgagaggctggcttacggaaggaaccctgggagtccatatcgttctttggacgttggccgccatggtgggcttcgtcctggctggccatctcgccatgatcccgcacaatccgatgggctggcccacttggtggatccttctcactgttgccgcgcacctgatctatctggcaaagctggcgggcccaatcagccgattcattaggaacagctaatgcgatggaccatgcggtacatgagagaacgcctcgaaacgagtcgttcccaaattgttgtcaccatgttgtcatacaggactgtaaaccactgaccacacccaaacggctgcccctgcgctacggggtgagccctatgactgtcgatgcggaaacgattaaatggggagattgcctggacgcagtgtcgcgaaccacgccgcaacctgtggtaaaacgtttcacacaatcctccggcacggaaaataatatcgaagaaaggaacgacgatggacgagatgacatggaccgacccgcagctcaaggcgcgctacgagaggaacctcaaggcgatggagcagcgccgggcggcgcatccggaactgctcaacaagtgggcggtgccgtacaaggtgttcacccgcagcagcctgcacgggatccagaacatgcgcatcaactggctgatggacaaccatccgcagcagttcagggagatgatgatggccaacgtgctcgaggagcatctgcgggacatcgagaggcgcacgagggaacgccaggcacagattgtggaccggctgatggagtccagacacctgctcaaccggacagactgcctgaaggcagcaccccagatgaccgacctggaccggctcaatgggatgaacgaggcgcaagcggagtcgatgagcatggcaatccacgagattgtggaaagcttctaaatgcaaacgcagatgttcatctgggtagtgttccgaaacggctctgtttgatcgtaccggtctttcagagtctgcggctctttcctaggtgaggcatggagtgagctttattaacagacttccaatacagctcgatatcgccgctataagccgccttgacatagcccggcatggtcttcctgtctgctgtgccggacttcaaccagcggttgtactcgtggatacacgagtgccaatacttagtgattctgtcctcatcaacggatgagcccgacttcgccaaagttcgtttcaaggagctgtattggctggtcgcatagagatgcgcggcaatatatgcaccaagcttcagaaagaacgatggtgctttttcaactccgatggattgcccccactcgcgctcaaagaggtcaatgtaggctcgcgagaacatcacattccaatcatcagagggacgaatagactcaaatagggataggaaacgagtgatctcatccaatagctcatggctttcgtgccagaactgcttgtcatcatcgtcgtgtttttgccactccatatcctctttttcaacaagcagatcgcgaagcgcgtagtcatctatagccccgtccttttccaacgattgacgtgcgaattcacgtacagagggcggctccatccaaccccagctccagagacgttgaggatcggagaccggaataaaataccaagtgacggtccgcatcaataagttcgtttcaatgggagcgctagtattcggaccatcattcacgatggtacgaatggtgcgctcggcgcggcgacgagtggtatcagtgagttgccagtgcataaatctaggctttctcggatatatgggcaaggattttcttagcgacgccgaacggaagcacattcagaatcgccgtgcgtacgtcatccgtcatggcctcaagaaacgctacctgggtattcagcggcatactcttcacatactcggacatcagctcaggcgtgctctccgcgtcgtctattggcgtcgccggcaactgagatgtcatccctagctgttgcctcggtgcatcttcgtagacgaccttctcgctgttcggggatcgatgcagaccgcgtatgtcatgctccatgccttcgagaatcttggcgttctcgctatcgattgcatgctgataatgcagatccgtactgagctgcgtgtggcccataaccttcatgattgtcttgtcggagttggtgtaggtcttcattacgctggccgcgcgatgccttagatcgtaaagacgaaggccacgttgttcaagacgaggcacactgcgacgcgcgttgtaccaggcattgcgcaagcgttgatcgtccactacggtatgcgtacgttcgccggtgaacaggaaggagtcgggcgcgtcgagaacataggtgcgtatgtgtttgtcaaggattccagcgagtgatgcgggtatctctaaatcgcgtacgctaccacgggttttcgggcgtccaatgaggatatctcgatgtccgccacccgtctcggaatcaggcacgcgtataggcttagcggttttggtgatgtggatgatgccgccagagagatcgtcagcaagcacgatatcttgacgctggagcgctgtgacctcgccggggcgcatgcccatgattcctatcagatagatgaccggtgcgaaacgtggcgtcatggcttgatagagcgtctcaagttcttccgccgacacattgccataggccacgtccgagcacggcttgctgacttcaatcagtacgggagatttcgtgagcagcgtggtgccgtccatatccaaaggtgtttccacagcatgattgaagatggcgcgcaaaagctcccacactttgcgcttgatggccccgccctctcccgcagcccccagcggcatggtgtcagcccaggcctgaatgtctttcggagtaataccgcccatcagtttgttgcccaacacgggaatcagatagtcccgcaggtactgttcgtacttctgcttggtggtgatggccagtggctcgccatttttcttgcggcggttctccacgaaattcgcagcatattcgccgaaggtgacttggaaggcagcactccgattcgacgcgatgactggcgggatccatcttccatcgtcgatctcgcttttggcttcagacagccacgcctcggccatgtggcgctgggggaagttcttggtgatgtactggggcagattaggccatttcgcgcgcgcttcgatcggcgggcggtaacgggcctcataatacttgtggccagtgcttttgcttgtgcgggcattgactgaaccgaagttgcgcctgttgcccatgtcgcctccaagagtggtaatcggacaatccgtggtaaaaatccggtgcatcagaaaagtaccacgctatttaccactgattgtacatggataaaaggcgcttcacgtgcttctggggagattatgtgaaggtggcagattggctgaaatcgttgaaattccgccattttcgagaaagaaaaagggccttggtgcgaagccaaaaccctgatggcggaggatacgagattcgaactcgtgaggctgttacaccaacacgctttccaagcgtgcgccatagaccactaggcgaatcctccattacgctgtttgccgcggccttttggcctcaacagacaactcgaagagaataccacagactcgcggacaagcaaaaccgtcgcgtgttgtgcgtgtgtcgcgcttggcggctcgcgcgtccgggatccctccggcgctccgatgcccgaattcagtaattgttcgagccggcaccctcgaagcgcacgttgaagccgcgctcgtagtgcaggaacatgtcggcgccgtagcggtccgcgtcgcggtgggtgaacagcatgcggatggcaaatgcggtctgcgcgtcgtgcggcatggcgcggaacgccttgtgggcgttccatcccgtctcggtgatcgcctagtcgggcacacctaccagcttgtcggcgtgcagtccggcaagaacctgtccgccacggcttccggcgattccgcactgtccatcgccgacacgcccgagaccctgaccgacaccaagaagcaggcctggaagttcacccagatcgaccagtccgacaccgagcgccccggcctcaaggcctacgtcatcaccaatacggactgcaaggtgctcgtcgccaaggacggcaccaacgccttcagcgatgagtcggtggaagacgccaagtccgaccccgcggcccggtggattttcgacacgtccgacggtgccacctaccagctgctcaacgcatccgcgaagcagaacatcaacgtcgacgcgttcgacccgaaggccggtgcggccgcttccgatgaggaggacggcgatctgaccgacaagatcctggtcgaaggttcggtgaacaccgagaaggccggtgaatacacgctgacgtattcggtgaccgactccgaaggtgcgtcgtacacggtcaagcgtgtcgtgaccgtcagggagaagtccgagccgatcgaaccgagcaagccgatcgaaccgaccgaactgacgaagccgactgagccgacgacacggtgaagccgaacaagccggatgccggcaacaagcagcccggcctgtcgaagaccggcgcctctgtgagcggcgtgttcggcgcgttcgcggcactgctcgcggtcggtgccggcgcggcgcttgccgcccgccgtcggcgcgagccccggcgctgaatcagcggatcggcatatgatgccggtcggtcacctattcggtggccggccgactttttgttgactgccggggcctcacgcgggaggtgaagtccacccatcccgccaaagtcccatttgagtgtcttcggatgggactttcgccggaacaagtcgaaaggaaccggggccgggactcatgggctggcgcattgccagtcggccctgtgttcgtgtcgcgtgggatgatggtggcatggtgacatcgaacattgtggagtttgcggggaaagcgcgcatgccgcgcctcggcatgggaacgatggcgctctctatcgagggacgcccggaccgggcgacggccatcggcacgatccatgccgcgcttgacgccggagtgcgttatctcgacaccgcatggtcgtattatctgccaagcgaaccggggcctgacggtacaggcgtgccgcgtgatttcgggtacggcgagatgctggttcatgcggcgctcgccagctggagcggtccgcgcgatgaggttctggtcgccacgaagactggttatcgccgaacgctggaagtgacgaaccgcgacgcggaagatcctcagcaatccccgggcgacggcgcgagcgcatccgcatccgagcgacagcacctgcaggcggccggcagccggtacgggtggatggccgactcgcgcccggagacgatgattcgtgacgcgaaggagtccgctctccgcctcggcgtcgacgcgctcgatttgttgtattcgcatggccctgaccccgcggttccgtatgaggatacggtcggcgcgctgaaaaccttgctggatgagggcgtgattcggttcgccggcatctcgcgcgtggacaatgcgcagattgacaccgcccgtgggattctcggcgaccgtctgattgcggtgcagaaccagttctcgccatcgcatcccgaccccgagcatacgatgggtcactgcgccgatctcggtcttgattttgtgtgctggtcgccgctcggcgggttcctggacgcattcgacagtcatgcgtatgatccgttccgcacggtcgcagcggcccgcggcgtctcgtaccagcgtgtggtgctcgcgtgggagctgaccagatatgaccgtctgttcaccattcccagtgcccgcaacccgcatgaggtccgggactcgttcgccgcagtcaatctcacgctcgcccctgaggagctgtctttactgccgtgaatcaacgctatgagtcaccgtcataaatacggaacaggctcgtcgtcaaacgagcctgagatacatgctggtggttccgggaatcggttgaaaaccgaaatgcgcatagaacgcgcgtgctttatcgtcgtaaggttccacaatgagcgcacgtgaccctagtgcgccgctgacagatcgtgctcgcagtgccgaatatgcactcagcgtgtagaatctcgccggttcacctaacgcagtgaatgacacgtacgcgacggccgtcccatgctgggccgatgacggtgcgcgttgtgcggcccacttgtcgatgaacggtactccacaagagaacttccccattctctcttccgggccgagcttgcgcggacgttggaaatgatggatcatgcccactgcggatccctttccgtgagtttttcggctgctggcggaaccggctgatccaatgcctgtatgaaatcttcgaatgcctgtgattccagatgcaggacggttgcttcttctatatccttacgggctgattccaggagatggcgagcggtccattgcgtgagcgtgctgccggtcagctcggcggcacgctcgatgagctgccgttgcgcatccgtcagtcgaatgtcaagccgggacgttttctgtttcgataccgtttgcttcgttagtgtcgccatagaatggttgtacggaaaaaatgcgtacagatcaagttagtagcaggggagtaaggcgcggacatataatcacatactgtaaattgtttacggtgtgagataatattacagatgtttgcacgatgtatatgccgctggaatgtattggcggtactccgcggagcgcggtagtgcggcaatggtcgaatcggaaggcggtgcgaaatgggttttgagcgggaggcgctcagcgaactgtacgccagcgtgtggggcaaccgttccaagatgcagaaggagttcgcgcgcggtgcgcatggcgagccattcattctgcacgagctcgcactgcgcggcaccatgacgccgtcgcagctcgccagttcgctgaaggccagctccggccgcatctccacagtgcttgccgctctggagaaaaaagggttgatcacccgagacatcgacccggacgaccgccgcatcatccgcgtgaaccttacggatgccgggcgagagcggtccaagtgcgacttggaggagatgcgttcggcaatctgttggatcttctcgcagatgggggagcggcgcacgcgcgagttcgttgatctgctgtcggagttctcgacatacatggccatctgccatcccggcgcgccgcgcccgacccccgatgaggtgcgggccgcgttcgccgagcgtgacaggcgtgtcgccgatcatatgcggaccgagcgcgcgaaggccggcgaggagtagcttcttccgccggctgcggatgacgtgggggacggcgtgcgtgccgtgtctctcgtgcgcagccagcgcaaagcgcgccattcacagcgaatacacagaataatgcgtaatatcttacactgtaagtaatctaacaacagaaactaattcgggcatcggatatcgatgccgcggcaaataacgtaaccaatcaccaacaaaacacaaggggaaagccaatgcttcgcatcctgaaatacctctccaaagcggagatcggtcagatgctcatcgccctggtgaccatcgtcgggcaggtcttcttcgacctcaaactgcccgattacatgtcagacatcaccacgctcgtcgagacgccgggcagcgcgatgagcgacatctggatcgccggcggcaagatgctgctcatctccctcggctccgtcgcctgtgccatcgtcaccggctacatctccgcacgcgtcggctcgtcattcacccagcgcctgcgctcgctcgaattccgcaaggtcgaatcctatggccccgccgaaatgagcaaattctccaccgcgagcctcatcacccgctccaccaacgacatcacgcagatccagatgttcatcaccatcggcctgcagctcatcgtcaagtcgccgatcatggccgtatgggccatatgcaagatcgccggcgaaggtttcgaatggactctcgccaccggcatcgccgtcgtcatcctgctcgtcgccgtcgtcatcatgatggccatggtcatgcccaagttcaaggccatgcagaagctcaccgacaacatcaacctcgtggcccgcgaaaacctcaccggcctgcgcgtcgtgcgcgcctacaacgccgaggactaccaggaggccaagttcaccaaggccaacaaggacctcaccgacacgcagctgttcaccaaccgcgtcatggcgttcatgatgccgctgatgaacaccgtcctgaacggcctgatgctcgccgtctactggatcggtgcctatctgatcgacgccgccggcctgacggacaagctcaacgtgttctccaacatggtcgtcttctccaactactccgtgcaggtcatcatgagcttcctgctgatgagcatggtattcgtgctctggccgcgcgccgacgtgtccgcgcaacgcgtgctcgaagtgttcgacaccgatccgatcgtcaaaaccggcaccaagaccgccgccgacgtggcgcgtctgggcggcgggaaaaccggcaccgtcgagttccgcaatgtgagcttcacctaccccggctcacgcgaggcgacgctcgaaggcatcgacttcaccgccgaaaagggccagaccgtcgcgttcatcggctccaccggctccggcaagtccagcctcatcaacctcgtgccgcgcttctacgacgtgtcggccgggcaggtgctcgtcgacggtgtggacgtgcgcgaatacgatctgaaagcccttcgcgacaagatcggatacgtgccgcagcagtccgtgctgttcaagggcacggtcgcatccaacgtgagctacggcgacgacgtgaacggggcaagctccgcggacgtcgaaatggccgacacctccactccggccggccgcaaacgcgaagccgaactcatcgccgcgggcaagagagcggaaggcgccgcaatgccgactgaacagatgaaccgggtcaaggcggcggccggcgtcgctcaggccaccgagttcgtcgagcgcatggacggcacatacaccgccccgatcgcacaaggcgggtccaacgtctccggcggccagaagcagcgcctgtcaatcgcgcgcgccgtctaccgccaccccgaaatcctgatcttcgacgactcgttctccgcgctcgacttcaagaccgaccgcgaagttcgcgacgcactcgccaaagaagccaagggatccaccaagctcatcgtcgcccagcgcatcggcacgatcatgaacgccgaccgcatcatcgtgctcgatgacggcaaggtcgtcggccaaggcacccatcaggaactgctcgacacctgcgatgtctaccgtcagatcgccgaatcccagctcagtcagtcggaactgaccgcgtgagatcaatacggacttttaaggagtaacaaatgccaggaccaagaggaccaatgggcggcggccgcacggtcgaaaagcctgccaatttcggcaacgtgatgggcaagctcgtccactactgccgcaactacctgcccgtcatcatcattgcgctcgtgctgggcgcggccggcacgatatgccagatcatcggaccggacaagctcaaggacatgaccaacgagatcgtcaagggactgccggccatcgtgaacggcaagccggtgatgaactcggtcgatttcaacgccgtcggccgcatcgcctggctgctcgtcgcactgtacgtcggctacgcggtgctcagctacgtgcaaagctggatgatggcgaacgtcacccagcgcaccgcccagcgcctgcgcgaatcgatctcggtcaaaatcaacaagctgccgctcaaatacttcgacaaggtcagctacggcgacgtactctcccgcatcaccaacgacgtcgacgccatcggccagacgctcggccagtccctcggctcgctcatcacctcggcaacgctgttcgttggcgcgctcgtcatgatgttctacaacaacgtcatcatgaccctgtgcgcgatcggcgcgagcatactgggactcatcatcatgatggtcatcatgaaatcctcgcagaaatacttcgcccgccagcagatggcgctcggcgacgtcaacggccacatcgaggagatgtacgccggtcacctcatcgtcaaggcgtacaacggcgaggccgactcaatccgccgcttcgagaagtacaacgccgacctgtacgaatccggctggaaatcgcagttcctgtcaggcctgatgatgccgctgatgaacttcgtcggcaacttcggctacgtgatcgtgtgcgtggtcggtgcggcgctcgccatggacgggaagatcgaattcggcgtgatcgtcgcgttcatgatgtacatccgcctgttcacccagccgttgagccagttcgcgcaggcgttccagaacctgcagcgatgcgcggccgccgccgagcgcgtgttcggcttcctcgaagagccggagatggatgcggaaccgaccaaggccgaactcggcgtggctgatgccgctgcgagcacggcacggacggacagcggcaagctggcgcatcgcggcactcgcgcgaatgccaccgccggtatgacggcttcgcagcgttcgcagctgctcggctacgatgcggccggcaacccccggaccgtgcgcggcgacgtcgaattcagtcacgtgcgattcggctatgagcccgacaagccgatcatccacgacttctcggcaagcgtctccgccggccagaaagtcgccatcgtcggtccgaccggcgccggcaaaaccaccatggtcaacctgctgatgcgcttctacgagatctccggcggctccatctccatcgacggcatcgacaccacttccgtgccgcgctggaacgtacacgaccagttctccatggtcctgcaggatacatgggtgttccgtggcaccgtgcgcgaaaacatcgcctactccaagcccggcgtcaccgacgagcagatcgtctccgcatgcaaggccgtcggactcgaccacttcgtgcgctctctgccgcagggctacgacaccgtgcttgacgacaacacttcgctctcccaaggacagcgccagctgctcaccatcgcccgcgccatggtgcaggacgctccgatcctcatccttgacgaagccacctcctccgtcgacacccgcaccgaagaactcatccaaaaggccatggatgcgttgaccgtggggcgcacgagcttcgtcatcgcgcaccgcctctccaccatccgcgacgccgacatgattctcgtcatgaaccacggcgacgtgatcgagcgcggtacccacgaggaactgctcgcggcgggagggttttacgccgacctctacaacagccaattcacactcaccgattgatggggcgcccgttgcgctcgctggattgatgaggctgacagcccggtgaacttacgcatggcagtgcgccgtgcgtgggctcgccgggctgtttgctatgtaggcgagtgatgggcggagaatttcctatatatggtgcgcgacgggttcggggactgtggtttgcgtccctatgtgcgcacggtcgtcgttccggcgcgcacatagcgacgcaaacgggagaaggattgttgagagcggatgcgctggtgcggcagatggccggtgtgcttccatagaacatgattatgacgagagcagaggggcgtccggcgcgtatcgccctctcggtctgccacacaatgcgtttttcgatggtttttgggctggtgtggtacgcgggcatcggaggagtcgtttcgggccgttgaaaaatggcggttctgcggtgcatgttgtgccacaccacgtgatgtgagggttcacatttcattgtgaggcagactggctggccacacaatgcgattttgatgtgattttgcgctggtgtggtacgcgaccggctgcgctgacgacttggcccgccgatggcgcggatggtgtgctcccgctgtcaggagctgccgagcgtagcgaggctgggggcggtcttgccggcggccctgcaccctgtgataataatgccaagaatgttacgtaattctgggaacaacggtatccagggactctctgagagctgtggttccaattgaagacacaagtcgccgacggacttgattcttttagtaaacaatgtatatattgacatgagccggcaaagctgctggctgccctataggagaaagaaccaaatatgaaacatagagcgatgtcatcgcgtctgatgccactggtggcgtcctgcgcgacggtcggcatgctgctggccggactacctgcgtcggccgtcgcggtcggcacgacgagagcggcagcgtccgacgcctcgtcctccaccacagcaaccatcaccccctccgccgataccacgttgcagacatggacgagcgagaagaattcctcaatggcgtccaagccgtacatcggcacactgcaagggccctcgcaaggcgtgttcggcgagaagttcgagtccacggatgccgcggacaccaccgatctgaagaccggcctgctgacgttcgacctgagcgcctacgaccatgcccccgattccgcaacgttcgagatgacgtacctcggctaccgcggcaacccgacggccactgacaccgacaccatcaaggtgacccccgtcgacaccaccgtgtgcaccaataacgccacagactgcggcgcgaatgtcgcgaccggcgcgaccaagccgaagttcagcatcgacgactcctcattcgtcgccgagtccaagccgttcgagtacggtacgacggtttacacgggcgacgccatcaccgtggttcccgccaataccaagaaggtcaccgtagatgtgaccgaaatcgtgcgccagcagttcgccgaaggcaagaaggtcatcaccctggccgtgggcgagaccaagaagaccgaggttcgtttcgccagttccgaaggcacgacgtccctgaacggcgcgaccgcagacatggctccgaagctgaccgtttccgtgtccaccaaggacgatctcaagccctccgccgacaccacgttgcaggcatgggccagcgagaagaacgagaagaagaacactgcggcctatgtcggcgcgctgcagccggaaggcgattacggcgacttcggtgagaagttcaagtccaccgacgtccacgatgtcacagacgccaagatgggtctgatgacgttcgacctgtccgattacaccgcggcgcccgagcactccatcctcaccttgacgtatctgggctacgccggtgcagacaagaccgccacggccaccgataaggtcaaggtggtcgctgttgacacgtcgcggtgcaccggcaccgctccctgcgacaccgacaatgccacgtgggcgaaccgcccggacttcgaggtgaccgataccacgaagaccgcgacgtcccatgcgttcgcttatggatctaagaagtattccgatggcatgaccgtcgaatcgggcaacgccaagaaggttctgctcgacgtgtccgacgtcatcaaggcagagttcgccaagttcggcaccggcgccaccgagaagaagatcacgctggccctgggcgagctcaacaagtccgacatgcgtttcggcagcaaggaagtcacctcgctgaccggcgccaccgaggccatgcagccgaccttgtccgtcaccaagaagccgaaggcatacacgctgagcatcgaaggcccgaccaaggtcaagtaccagaagggcgaggcgttcgacaaggccggactcgtggtcaaggccaccagcacggctgacggcacggtcaagacgctgaccgaaggcaacggtgaggataactacactatcgacaccagcgctttcgatagtgccagcatcggcgtataccctattaccgtgaagtacaacaaggaccccgaaatcgccgcttcgttcaacgcctatgtcatcgccagtgttgaggacggcggagacggcgacaccagcaaagacgactggctgtggtacaagcagcccgcgtcgcggaccgacgccaccgccaccgccggcggcaattacggcaaccccgacaacaaccgttggcagcagaccaccttgccgttcggcaacggcaagatcggcggcaccgtctggggcgaggtcagccgtgaacgcgtcaccttcaacgaggagacgctgtggaccggcggccccggatcctcgacccgctacaacggcggcaacaacgagaccaagggtcagaacggcgccacgctgcgcgcgctcaacaagcagctcgcgaacggcgccgagacggtcaatcccggcaacctgaccggcggcgagaacgcggccgagcagggcaactacctgaactggggcgacatctacctcgactacgggttcaacgacacgaccgtcaccgaataccgccgcgacctgaacctgagcaagggcaaggccgacgtcacgttcaagcatgacggcgtcacctacacgcgcgaatacttcgcgtcgaaccccgacaatgtcatggtcgcccgcctcacggccagcaaagccggcaagctgaacttcaacgtcagcatgccgaccaacacgaactactccaagaccggcgaaaccacgacggtcaagggtgacacgctcaccgtcaagggcgctctcggcaacaacggcctgctgtacaactcgcagatcaaggtcgtcctcgacaacggtgagggcacgctctccgaaggcgccgacggcgcttcgctgaaggtctccgacgcgaaggcggtcacgctgtacatcgccgccgcgacggactacaagcagaagtatccgtcctaccgcaccggcgaaaccgccgccgaggtgaacacccgcgtcgccaaggtcgtgcaggccgccgccaacaagggctacaccgccgtcaagaaagcgcacatcgacgatcattccgccatctacgaccgcgtgaagatcaatttgggccagtccggccacagctccgacggcgccgtcgccaccgacgcgctgctcaaggcgtaccagaggggctccgcaaccaccgcgcagaagcgcgagctggagacgctggtgtacaagtacggccgctacctgaccatcggctcctcccgtgagaacagtcagctgcccagcaacctgcagggcatctggtcggtcaccgcgggcgacaacgcccacggcaacacgccttggggctccgacttccacatgaacgtgaacctccagatgaactactggccgacctattcggccaacatgggagagctcgccgagccgctcatcgagtatgtggagggtctggtcaagcccggccgtgtgaccgccaaggtctacgcgggcgcggagacgacgaaccccgagaccacgccgatcggcgagggcgagggctacatggcccacaccgagaacaccgcctacggctggaccgcacccggtcaatcgttctcgtggggttggagcccggccgccgtgccgtggatcctgcagaacgtgtacgaggcgtacgagtactccggcgaccctgccctgcttgatcgcgtgtacgcgctgctcaaggaggaatcgcacttctacgtcaactacatgctgcacaaggccggctccagctccggtgaccgcctgaccaccggcgtcgcgtactcgcccgaacagggcccgctgggcaccgacggcaacacgtacgagagctcgctcgtgtggcagatgctcaacgacgccatcgaggcggccaaggccaagggagatccggacggtctggtcggcgataccaccgactgctcgaccgacaactgggccaaggacgacaacggcaatttcgccgatgcgaacgccaaccgttcctggagctgcgccaagagcctgctcaagccgatcgaggtcggcaactccggccagatcaaggaatggtacttcgaaggtgcgctcggcaagaagaaggatggatccgccatcagcggctaccaggcggacaaccagcaccgtcacatgtcccacctgcttggactgttccccggtgatttgatcaccatcgacaactccgagtacatggaggcggccaagacctcgctgaggtaccgctgcttcaagggcaacgtgctgcagtccaacaccggctgggccattggccagcgcatcaattcgtgggctcgcaccggcgacggcaacaccacgtaccagctggtcgagctgcagctcaagaacgcgatgtatgcaaacctgttcgattaccatgcgccgttccagatcgacggcaacttcggcaacacctccggtgtcgacgaaatgctgctgcagtccaactccaccttcaccgacaccgacggcaagaagtacgtgaactacacgaacatcctgcccgccctgcccgacgcctgggcggacggctcggtgagcggcctcgtggcccgcggcaacttcaccgtcggcacgacctggaagaacggcaaggccaccgaagtcaagctgacctccaacaagggcaagcaggcggccgtcaagatcaccgccggcggcgcccagaactacgaggtcaagaacggtgacaccgccgtgaacgccaaggtcgtgaccaacgcggacggcgcctcgctgctcgtgttcgataccaccgcaggcaccacgtacacgatcacgaagaaggcgagcgccaacgtgcccgtcaccggcgtgaccgtgaccggcgccaacaccgccaccgcaggcgacaccgtcactctgacggcgaccgtcgccccggccaatgcgaccgacaagtccgtcacctggtcgacctccgacgccgccgtagctacggtcaacgccaacggcgtggtgaccacgaagaaggccggcaaggtgaccatcaccgccacgtcgaacggcgacaagacgaagttcggttccatcgagatcaccgtctccgccgcgaccgtgcccgtcaccagcgtcaccgttgccggcgacgccgcgatgaccgtcgatggagagcagaccctgacggcgaccgtcgccccggccaatgcgaccgacaagacggtcacgtggaagtcctccgacgccactgtggcgacggttgacgccaacggcaaggtcgtcgcgaagaaggccggcgaagtgacgatcaccgccacggccggtggcgtgtccggcacgctgaagatcacggtgagcgacaaggccccgaccgtcatcccggtccagtccgtgaccgtgacaggcaagcaggagctcgtcgaaggcgcctccacgaccctgacggcgaccgtcgccccggctgacgcgaccgacaagacggtcacgtggaagtcgagcgacgagtccgtcgccacggtcgacaaggacggcgtcgtgaccgccaagaaggccggcacggtgaccatcaccgccacggccggtggcgtgtccggcacgctccacatcaccgtgacggccaagcccgtcgagaccgtccccgtcaccagcgtggaggtcaccgtcgaggccggcaccaccgtctccgtcggcaagacactccaggccaccgcgaccgtcaagcccggcaacgccaccaacaagaaggtgacgtggaagtcgagcgacgaatccatcgcgacggtcgacgccaacggcgtcatcaccgcgaagaaggccggcaaggtcgtcatcacggccacctcgaccgacggcacggacaagtccggcagcgtcgagatcaccgtcgcggatgagaccaagccgacgcccgaccacaagtccgtcaaggccgataccggcgacgtgaccgccggcaagaccggtacggtcaccgagccgaaggacgtggcgggctggaagagccgctccatcatcaagcaaggcaagctcggcaaggccgaaatcgccgacggcacgctcgtgtatgcggccggcgacaagaccggtgacgacagcttcgtcgtgcagtacacgatggccgacgacacggtcatcgacgtgacctacagcgtcacggtcaaggccgccgaaaccggcaagaacgacggcgacggcaagggcgacggtgtcgcgaagaccggcgccgccgtcggcgcgctcgccggcctcggcttgatgctgctcgccgtcggagtgagcgtggtgatgattcgccgcaagcactccgcctgatccccagtcagaccggccagtcgtgaccggtcggcctgactgactctttctccaccgtcccccgtcggataaaccccggcgggggacggtggcttgttgcggccggtctgccgtcgcgcgcggtgtggcctgcagccgggtgccgcacgtcacgctcatgcgcgatactggagacatgaagatttccgctgacttcacggtgatgcccgacgacttcgccaaagccgccgcgcccgaataccgcaccgacggcgtgcccgtcatctccttcccgttctatatcgacgagatcgatcccgccgcccggtacctgcactgggcgttcaccgaccccgactccatcccggtctgcggattcgaatggattcactggacggtcgcgaatctgcccatcgacgcgctgatgtacgacttcaacgattcccatgcactgcagattccgccggacttctcccggcagctgccctccatgattcccgagaccgtgcagggccgcacgtcggccgcgagcaagctggtcggcagcacgaatccgcaggtgacgatgcgctacaacgggccccagccgcccgacaaggaccacgactattcgctgcacgtgtggggcaccgcgaagccgttgccgggtctgaaccaaggattctggctcaacgagctgttccacgcgctgcgtgacatcgaccacgtcaccgatcagggtgtgatgttcatcaccggaaaagcctgagggctgatgccgtatactcccgtacggagtcatacactcatgtgacaggaggcgcgccgcggatgcgcgccgcaacgtgcacgcgacagcgtgtgcacagcaagaaaggacagtaccgaatactatggcatgcaccacgattctggtcggcaaggacgccagctatgacggttcgaccatcatcgcccgcaacgaggattccgccaacggcgaattcaacccgaagcggttcgtcgtcgtcaagcccgatgaacagccgcgcgaataccgcagcgtcatcagccacctgaccattgacctgcccgacgatccgctgcagtacaccgcagtgccgaacgccgacctgaaggaaggcatctggggcgaggccggcgtcaacgaggcgaacgtggccatgagcgccaccgaaacgctgaccaccaacgagcgcgtgctcggcgccgacccgtttgtggaataccgggcggcacgcgggcgggaaggtgactcggattacgagccggccgtgcccggcggcatcggcgaggaggacttcctgaccatcgtgctgccgtacgtcaccaccgcgcgtgagggcgtgcagcggcttggcgaccttcttaaggaatacggcacctatgagatgaacggtgtcgcgttctcggacgccgacgagatttggtggatggaaaccgtcggtggccatcactggatcgccaagcgcgtgcccgacgaagcgtatgtgacgatgccgaaccagctcggcatcgacgaattcgacctcgatgacgccctcggtgagcaggagaaccacatgtgctccgaggatctggtcgaattcatcgagcgcaatcaccttgatctggccgtcgaatcgacgtcgccgttcaacccgcgtgatgccttcggctcgcactccgactctgatcacgtgtacaacacgccgcgcgcatgggtcatgcagcggttcctcaacccgtacgacgagatgtgggacggccccgaggccgaccaccgcccggacagcgatgacatcccgtgggcccgtcagcccgagcgcaaggtgacgatcgaggacgtaaagtacgtgctcagctcgcactatcagggcacgccgttcgacccgtacggccacctcggcgacgagcacacacgccacatgtaccgcccgatcggcatcaaccgccagagccagctggccgtcatgcagattcgcccgtaccgtccgcagtcggaccgcgcgatccagtggatcgcctacggctccaacccgttcaacacgctggtgccgttctacccgaacgtcaacgaaacgccgaagtatctggaagacacgaccacgcgcgtgacttccgagaacttctactgggagaaccgcatcatcgccgcgctgtgcgacgcggcgttcgcggagacctccaacgccatcgagcgctatcaggagaagaccggcgcgatgggccaccgtttgatcgccgccaccgacgagcaggtcgcgcgtctgggcggtgccgacgaggccgcggccgccttggccgacgcggagttggaggcggcgaacgcggacggcgacgtcgagccgatggatcccgaggacatcatcgacgcgacccgtaacgacgaggtgcgcgacatcctcgccgccgccaaccagaccatggccgaccagctcaagaccgagaccgaccagctgctcgacaccgtgctctacaccgtgagcatgaagatgaagaacggcttcaaccgctccgacaactgatgcgctgagaggcttccggccaagcgttttcggccgccggccgcttcgacggtaagcaagcgtcatacatctacagaaaggttcacctactgatgactactatcgaggagttcaccagccagtacgggctggtcaagaagatcgacgccttcgggtttatgaagtacctgcacgacaatcccgacgcgccgcgcaagcatggcaaggtcgtgctcgtcaccgccgatacgccgctcaaggcgtcgcgcggcgagggcaagaccacgacgacgatcgcgctgatcgatgcgctgcgggctcgcggcatcgacgcgaccgccgtgctgcgccagccgagcatgggcatcaccgccgccggttccaaaggcggcgcctcgggtggcggcaaggcttcgctgacccaccccgagctcatcgactggggcctgtgcggtgagatggccgccatcgccgccgcgcagaacctgctcgtctccttcgccgagaaggctgtggacgagggacgtatcgacacgatcctcgtgccgcgcgtctccgaagtgccgtcccgctcgctgcgttccatcaccgtggacgcgggcaagaacaacgtcgccgagaaggtcgtgctcaccccgacgtccgagctgatgcagatcgtcgtgctgtcccgttcgatggatgagatcggcgagcgcgtggccgcgatgatcgccggcacgaaggacggcgaaccagtcaagttcggcgacttcatcgacctgtggcgtatcaccgatatgctcgccgatgcggtcaagccggcgctcaccgagacggtgaacggctcgccggtgtatgtgcatggcggcccgttcgccaacgtgtcgatcggcatcccgacgctggtctccgtggagctggcgtgcgccctgcacgatgtggtcatcgtcgaggccggttacggcaccgacgccggagcgcagaagtggctcgacatcgcctgccgcgagtatggcgcgcagtggccgtccgcggcggtcgtcgtgacccgcgcctcgacgtggcgtgatgacccggagctggcgtggcgctacccgttccacgtggaccgcttggagaagctcgacattccggcgttcccgctggtgaacctgtgggacggcgaggacgatcagattcccgaactgcgcgagaccgcggcccgtctggagctgcgcgaccccatcatcggcaacctgtatcgcgacggcggcgaaggcctgagcgaccagatcgacgcattcgtcgatgtgctgtccaacacgtcgatgccgtccaagcatgacagccacaagggcatggccctgctggagaacgtgaagtgggtggccgagaacgcctacggcgtgccggccagccgtgtgctgctcaaggacggtttcctggattccctgggtgctgcggatgatctgtgcaaggccgccggcatgtcgctggacgatctggcgctggtcgccgtcaagtccccggccacgatgaccgacaatgaccgcgctccggaagacgagcgtacggtcaccctgaagaaggtcgaagtgcacgcaggcgccgggctggttcacgtgaacctcaccacgtccctgaccaccccgatgcccaagatcgtctgattgcggcagaggcgtgccgccggggtgccggggtacgtgtgctgtgagagtgtgcggcggcgtggcatgcggaatcatgccgcactcgcgctggccgcacaccgtgactgcatcatcacaacccctttcggattgtcggccgatcatacgggccgactggccgcaaggggctctttcatttatatatcggcaacctgtgtgccgcagaaaaggcgtcactgtgtgagggttacgtcactgtgtgcgtcctcacactccgtgacgcacccccgcaacccttgcaaaataagggttttgcgatttacgtcactgtgtgagggctcgcagcgtgacggtggtcgcacacagtgacgccatgcgcgacaatatagcggcggataccatcacacctgagctcagaagttaccgccgttccagccccagtcggtggtggcggtgtagcggatgtaggtgcggtcctcggggatgccgagctcgctgttgagcgcggccatgatcgacttggtcagcttctcccacgcagaaccgggcacggaacggccgaacacattgacctcgacgtatgcggccggggcatcgtcgctgccgccgaagtagatcggcatatcatcctcgaatgggcacatcagccagccctcggacttgccggggacggccgtgatcgccttgccgtaggcggccttcagcgcttcgcgctgctcgggagtggtcttgacggatacgtgagtgtggataacgggcatgattcctccttgattgggttcgttccctatcctaatcggttccgcggcgggcgcgggctgtgcggccatgtgtgaaatcagtggcggttcaggaaaaccgcggtgtgaagtcagcgatatgtattagacaatcaatgtgaggaaattgattgaacagctgatgaagttcggtattgtcggtgtggtcgcgttcatcatcgactggggtctgatgaacattctgctgatgacgcatatgcataacgtgctggccacgtcaatctcgttcttcgtctcactgatattcaattatctggcgagcatgaaattcgtgttcaagcaccggccggacatggcgcgctggatggagatcacgattttcttcgtggcggcgcttatcggctggttcatgaacgaggcgatcgtgtggaccagcacgtcgtggatgccgcatgattccatgtattccatgcacacgaagtacgtgctgtggacgaatgtcggcaagctggtagccacggtagtggtgatgatctggaacttcgtgatccgcaagtggctgcttgacgatacgcataccaatgcgatgaaccgtttgaggaagtccgagaaccgtttgagtcaggaagagctcgaagcgaagtgggagaacagcttctcgcatcggcttggcctgtggtcgctcgcgcatacgccggagggctggccgaagtagcgcggtatgcgctctcaaaactcgcagatagagtgtgttttccttcaaaaatgccttgtatctgcgagttttgggagcggcatccggcgtatcacacgctgacttcggtcagagtcggggtttcggtgctggatttgatctgccggaagccgacgaaggcgatggcaagcgaggtgatcgccagcacggtcgccatcaggaagcctccatgcgatcccatgtgatcgatgaagacacccgcgatggctgagccggctgacgagccgatcgagttcatcgcgcccatccacgccacgccttcggtgaatcgcgtgggaggcaccagatgcagcatcagctgattgccgttgatccacgtgggtgcttggcagacgccgatcagcaggtagatgatcatgatcacccacagatgcttggcgaacatgaatgtgcccacgccgagattcaccacgatgaggcagaagtagaagcgcttccacagcgggatggtccagttcttcgcgccgtacaccagtgcgccgcatagcgagctgaacgagaagcatgcgaacacgaaaccggtgtattgcttcatgttcgcttcggtggcgaacgcgatgatcgagatgttcgacgccgactggaacgcgccaagactgaaccaggtcacgcatacggcgatcaggcccggcccccagatcgactccttcttgccggcgcgggaatcggcgatggctcggtcgacggcggcctgcacggcctgctcgtcgtcgccgcgggcctcggcctctcggcgggcgcggtcggcggcgtccctctcgcgcatcttctgcgccttggcggcctcgcgcttgcggtactcctcgcgggtcagaccggcctctcgggccagctgggtctgtgatttcggctcggtcgtcagctcggtcaggaacatcagcgcgccgatgacgacgcacacgccggtgaacgagaacgccagcaggccagaaatcaccgccagcgtagaagccagcggattgccgatgatccacatgcattcatcgaacacaccggacagcgagagtgcgcggtcggtgcgctcccggtctcccttgagcatggtcgtccagcgggcgcggctcatcgcgccccacggcggaatcgcggcgaggaacggcgtcaggcagtacagcacccataccggggcgcggttggtgatgctggtggtcagggcgatggcggcgacgatccagaccaggatcgtcggaattgacacctgccgctggccgaacttgtcgaccagcttgccgagcagcgggctggagaccgccagcgcgatcgcctggatggcggtgagcacgccggccagcgagtagttgccgtagtaatgctgtacggagatggtgatggtcatgccgaccatggggaacggcatgcaggcgatcaccgagccgatggagaaccttgcggtgtgcggcatacgcagcagttccgcgtatccgccgaataccttatgggcgacttccttgattgcagccgcgacattggcgttattggacatgacagcatctcctttccgctcccgattggatgtcccccgtcggcgtggcgttgccggcggagccctcatcgtattgatgtgttgtcctgttggtcgcgcaaaggatgctttgcatgtttgcgtcacggcaactttaatcgcgcgttggggcgcgacacgcggtgttgatatcacgaacgcatcaattttcataacgttcataaacgacggtgatatatcggtgtatcagatggggtgacgagccggagtcgggtggtgccgggacgatatcgggtggggctgggccgtgccggggcggggcgatgttcgtcgggcaaacgccgccgcagacgcggcatcgccggccggccggtgaatgtgggacaatgaaagacagacatcacgagtcccgcaggaaggccgcatatgccgacaaccaccatacatttcgtccgccacggcaaggtatacaatcccgaccatctgttgtacgagcggctgcccggattccacctgtccgaccgcggcatgcgcatggcgcaggcgacgggcgcatacatcgcagccgaccccaagctcaacacggtcgccgcggtgtattcgtccccgctggaacgcacccgcgaaaccgccggcgccattctcgacgcgctcaacccggtacgcgccgggcgtggggaggagccgctggaactcatcaccgacccgcgtgtgatcgaagcgggcaacgagttccgcggcaagcgcatcggacatggcaagggcgcgctgtggcgcgacggcaactggaagctcgtgctcaacctgtggaagccgagctggggcgagtcctaccggcacatcgccgaacgcgtgggcgcgttcgcgaacgagaagatccgcgagtatgccggacggcagatcatcgtcgtcagccacgagtcgccgatctggagctaccggcacctgctggagaccggccaccccgagcattggatgttcctacgcaagaccgcgctcgcgtcgatcacctcgatcacctacgacagcgatacgggcaaggtgatgtccatcacatatgccgaccctgcggcgcaagtcgagtgagtgcggcgtgcgccggctgtacaatacacagagaggacggctgcgggctcgcccgcgaaaaggtgcgcatgcggcgcgggccgggactgacggcggccgcgtagcggtcacttgtgacgacgccgcgtaacggcaggcggcgagtggccggcggtgctgtgacgcggtggcccgcggtgccggcacccggcacggcggaaggttccgcgcgtcggcggacaatgaaagcgaaggagcgatatggcattccaacttgacgcgacggcgatcgcccatgtgtcgatgaatcccgcggtacgcgatgcggcggccgtcggcgccggactgatcgaactgtggccgctgaccgacgccaagcagatggacaatgacacgaaatatggtgagaacctgcaggtgcggatgacccgcatggccgcgcgggtcatgaccggcgacgacgtgacggtccccgatgcggagttcgtgtatgagggtgcggacgagattcccggtcgtccgcagcgagtcgtcgatgcgttgctcgccgcgaatgacgcttatgacgagatgggcgactactccgaaaccggcgacacgaggctgatcatgagaggcgccggccagttgggcgtcgattgggatgatgacaccgtgcacgccatcgccgaagcgttggaggcaatcgaacaggccatcggcgtgggcgatggtgccgccggtggtgccgccgccggtgccgccgcgcctgcgaatgctgcgcccagtgccgatgtcgaagccatcgcgcagcgattcgccgcggtgacggtggcggccgacgggttgctgcgcctgatcgatctgcgcaagccgtcgcgcgcggtgccggtgatgttctatgtcaacgaactgtgcgagcgcctgtcggtgccgcggctgtgcttcaaggccgagcagctgtcgtcgctgatgaccgcccgatcgctgactaacgacgacgaggccgccctagccgaaacggtgaaattgtttactatggtcgcggcgagtgagtggaaacgtcaccatgacgacgtgctgtgggatgccgccgaggcgaagcggctcgcgaaagaggaggacgagcgccgcaacaaggaggcgctcgccgccaagttcgcgcacgtgggcgacgacccgtccaagccacccgtggagctgtgacggctgccgcctgacgtctgatgggacggggcggagacctgaaatatatgcgattcaccgctgactgctcggaatcgtgccgacctgcttgcggcgcggccgctgaatgtggcgtacctcttccagaacctgaggaacgccttgccgaacgagcacccgtagtagggtttgtccagcggtggctcgcctgtgccgaactgagaggggccggcgtaaggactgttgccgccgtactccggcgcggccgtatatggctgctgtggtgcggcgccggctctattcgccgtcgtcgttgaacgcgatggtgtcgtccgggccgaggagcaggcgttccgcgagactgatgatggtcagcagcagtgcggtcagtgcgaccaccatgatcgttgcggagaagatcagcggggtgcggaacgagttgaaagcggcctgcagccagatgcccaggccgttcatcgcgcccagatattccgccgtcaccgcggtgccgaacacataggcggcgctgatacgcaggccgccgaacacctggcgggcggcgacgcgcagcttcacatgccacagcgcccatgcgcgggtggcgccgcaggtgagcgccacgtcctcgtagaactgcggtacggcgagcatgccgcggcacgtctgcacggcgacggggaacacgccgaatacggcgacgatcacgattttgccgagcggctcgaacccgaaccagatcatgaacagcggggcgatggtgatgagcgggatggtctgcgcggcggcgagcagcggatagataccgcgatacagggttttggacacgtacaggccgatgccgatgagcaccccggccaccgctgcgatgagaaagccggtgattgcctcgtatgtggtgatggcggtcgcctcccacaggtcgggccaagtcttgacgatcgatgcggcgatctggctgggggaggcgagcacgcgttgggagatgtggcccgcatccacggcgatctcccatacgatgagcagcccgccgaccgtgaccgccggcggcgcgacgcgtgcgaacagggatttcagtgtgcgcatggcgtgatcttcggacaatgtgaaaccttagggatgggattgatggggactggcgggttgacgggctgacggagggagatgggccgggtaggagggagaagggccccggaatcgttacgagagtcggaaaactcccctccgtcccgtctcgtgacggaccgaaggggagtggaggttggcccggccggctgtgacgaacctgtgctcgcggattcgctgaactgtagctagattggctgcggccggactggctgcggccggctcagcccacgtactcgttggtcgcgaggtccttggcctgcggcgcggacgcgggatcgttgccgtcctggtccttgtaggtgccggccttgtactggaactccaggtacggctgcgcgtcatcgaagttcgtggtgccgggcagcgacttcggatcgtcggtcgtccagtagttgttcttggcgatctcctccatcgaggtgcgggtcagcttggagtcgagctgcgcctccttggcctgttcgaccaggatgtcggcggccttgtccgggttggcgagcgcgtagtcgtagcccttcttggtggcggcgatgaacttcttcagcgcatccgcgttggcggagtccttgagccaggagcccttgacggcgaatcccagctggtcggggttgccgggcacgccccagtcggaggcgacgaagcagttgagcttcgggccgttcaactcgctttccacgccttcccaggtcacgtagaagccgccgaaatcacccttgccgctggtcagcgtctcgaaggtgttggtgccggccgtcgcggtcttgatgtcgccggtgccgccagcgtacttgatcatctggcggacgaccgcggtctgctcggcggagccgaagctgacgaaggtcttgccggaaaggtccttgggcgtcttgatgtcggtgcgggatgccagcgcgcaccaacgggcgaccggcttctgcgtcaggtcgaacacgaacttcaggtcagcgccctgcgagttgaacgcggcgacgttgctcagcgtggtgaagcccacgttggccacgccgttctcgacgctggtttcagctccggcctgggcggtcggcaggatcttcacgttgacgccggcatccttgtaatagccgagcttctgagccacgtacagaccgatgtggttcgtgttcggcgtccagtcgagcatgaacgacacggtcggtgtggagccggagttcttggaatcggtgttgctcgcggaattggtgtttccgcaggcgctgagcgtcaggccgagcgcgacggccccaaccatcgccacgatcttgctgaagcccttgactgtcttcatcttctgtctccttgccttctgcgcacgtcgtgcgcctgccggctgacacacgccgggcgggaaggtgaggagcccgcgcgacatgaatcagacccgtcgcatcgcagcgcgacacatatcgccttgcaatgcgtttacttctctgatgtctggcacggctgctgccaccaaccgcgcgaacgttctccagtatagcggtatgcgggggatcgtggtatgtctcgacgggcggcttcgcgcaggagtcggtgtgacggcgcggcatcgggccgccatggcatgtctcccgccggtggacatgtgtttgccggattgccggggcattgctgttttctgctgttctcggggcggaccgtttccccgccgggttcatgggctacgatgctagtggctcgtgaaatggcttgtgagatcaaggaggatgccgatgatgaaggccgtgttcttcgacttggacgggacgctgatcgattccgatccgtattgggtgcgctctcaggagaccttggtgcgctcctgtggcggggaatggagcgacgcgctcgccgatgcgctgcagggggcggccttccccgagaccgtgcgtctgctgcgcggtgcgggggtcgattgggatggcgatgcaatcgtgcggcacctgtccgatgaggtgctgcgcatggaaaaggagcgtctgccgtggattgagggcgttcgcgatgtgctgtccggtctggcggcggcgcacgttccggccgtgctggtgaccggctccccgcgcgagatcgtcgagaatgtgatggcgcaggcgcctaagggcgcgttcgtcggctatgtgtgcggcaacgacgatgtgacgccgaagcccgatccggcgccgtattggcgtgcggcgtcgatggtcgggctgccggccgatgcgtcgggtgctggtcagtgtctggttttcgaggattccaagcccgggttgacggcggctcgggcgtcgggcgcgacggtggtcgcggtcaccggccatgctcgtgtggatatgagcgacagtgggctgtgcgatgaggcaatcgttgactatcgcgggctgaccatcgccgatttggccggctggatgtgatgtgccagccagattgtcgtggcgttgcaacggtttcatgggttgttccctcatattcgcacgtgtttgggcttcgcgtgactcggtcggataacaggaacttcatccttcggcgcgaaagcggcatctgcgtttcgagggggtgatttcgtctcgcccaaacatctatctacgtttcgaggggttgctgtctgccagtatacgaagtatgaggggcggaatatcgccatcaatatagggaggattgacgaaaagcaaccccttgaaatgcagatagatgtctgcgagggctgcgatcaaccccttgaaaccgagaaagtggtgttgcggactcttttcgtgtggtggcgcttgattatgttgtggcttggctgcgacatattgcgagtgcactgtcgatgatgagtgaatggcggtggggatgccattcgatgatatgaagctcgtcaagcgtggaatctccagtgtacgagcacgaatccgctcgtttgcgtccctaagtgcgcgccgaaacgacgaccgtgcgcacatagggacgcaaacaggggcatttgcgtccttatgttcgcgcgcttgtcgtttcggcgcgcacttaaggacgcaactcggggagtgacgggagtgtaggcacgtatgtgggccttgcggcgcagcaaagatatggggcagtcccaaagaaaccgggtgaaggtagcggtgtgaatgagcgcggcatgtacgaacacggggtaggcgggcaatgcgcaatcagcaggaacggtggtgcgtctcgggcgggaatggtcggaaggatccagcgcgctgacaagtaggaggggcgggcttgcgaggcgaaccagcatggaaggagttggcgcaccgcattgactggcgggagcgagcggcggaacgaaaggggtgtaaacaaggcaacggggagtgccgcgtgtgaccgtttacatacatgagtgtagggattgtgtgacgactcgctgtgcgcgctaacacgatttgcgttttgccagtggttgcgatatatgagtatcaacgataatttcggttgcggtgatggaatcgaaacaagcaattggagctgtataagtagtaatacaaggggacaatcatgaataacgatcagaacaaggtcatggaccagcgcgagatccgcgaggacgagtcgcaggattgggcgacgctgttcgccggtctcgccgcctgagcgcgccgaaatatcctgaccgaggcgcacttgccggattgacgatacatcgccgtacatggaatccgacagtcacccatcggcaggacgacgcagcaaccttcatgcgcaacgccgtcgaagccgccatcaaagccggcgcttcgaccgccataccagcagccgttccttctgccatcgacggcgcgaccgtgagaccgattgaccaaaagtgagtgaaccggctcacgtcccgttgacgcggcacaatggaacgtatgactgaagctgaacattcaaaagacaccaaaccagaacttccggctcatgttcgcgtgcgcttctgcccatcgccgaccggcacgccgcatgtcggcatgatccgtacggcgttgttcaactgggccgaagcccgcgccaccggcggcaagctgatcttccgaatcgaagacaccgacgccgtgcgcgactccgaggaaagctacaaccagattctcgaatccctgcgctggctgggcatcgactgggacgagggcatcgacgtgggcggcccccacggcccgtaccgccagtccgagcgcggcgacatctacaaggatgtggccgcaaagctgctcgaagccggctacgcctatgagtccttctccactccggacgagatcaaggagcgcaacctcgccgccggccgcccggccgaattcggctacgacggttacgaccgcgacctcaccgaggagcagaaggccgccttccgcgccgagggccgcaagcccgcgctgcgcatccgcatgcccgacgaggacatcgccttcgacgacctcatccgcggcaccatcgaattcaaggccggttccgtgccggactatgtcatcatgcgcccgaacggcgatccgctgtacacgctcaccaacccggtcgacgacgcgatgatggacgtcaacgtcgtgctgcgcggcgaggacctgctcagctccaccccgcgtcagatcgtgctgtaccgctacctgatggagctcggcatcgccaagcagatgccgctgttcggccacatgccgtacgtgatgggccagggcaacaagaagctctccaagcgcgacccggagtccaacctgttcaaccaccgcgacaacggtttcatccgcgagggtctgctcaactacttggctctgctcggctggtccatcgcccccgaccgtgacgtgttctccatggacgagatgatcgccaagttcgacgtgcgcgacgtgaaggccaacccggcccgcttcgacatcgacaaggccatctccatcaacgccgagcacatccgcatgcttgagccgcaggacttcctcaaccgttccgtgccgtacctgcaccgcgacggtgtggtctcggccgacaattgggatgcgctgaccgaccgcgagaaggtcgtcctgaccgcctccgctccgctgatccagccgcgcgtgcgcctgctgggcgaggtcgccggcatggtcggctccctgctgtccaccgaggagtacctggagcctgcggacgatgccaggaagcagctcaaggactccgccgccgacgtgctcgatgccgccgtcgccgcgcttgagggcgtggacgaggccgattggaagaccgacaacctgcacgagaccctgaacaaggcactcgtggaggatggcgggtacaagccgcgtctcgccttcggcccggttcgcgtggccatatccggccgtcgcgtctccccgccgctgtttgagtcgatggagatcgtcggcaagccgctcaccatcgctcgactgaagggcctgcgcgagcacctgtgatgtaacgcggcgcttgtgcgcatgcggaatccggcggacggctgtcgcaagacgccgcccgccgtctgctatctgcggagtttgcgcctccgctggcgggctgagccgtgaagcgaacggaggtgtcgttcgtaatcgaaggcgagccgacatacgagtagacaatactgcccccgcaggggtgtcacgaagcgactgggggagtctccgccgatcaggcgggcagaactcctccgctgatttaccgtcccaaataacgctccgccgtaacatacctcccgttcttacccgtgaagttttctgttcctcgatacacgacgattctgcgatcgaccggcacgcccagttcttccccgacggtggcgagatgcctgaagaaatctggtcgcggagtcattctcgatttgatctctatgagggtggggctacggcgctgcgtagcgtctacgaggtcgatttcgctctggttggtatcgcggtagaagtacagctcgccgtctttgttcttgttgaggtatcgcttcacggtttgcgaaatgatgagattctcgaacgcatcaccgcgcttggggtcgttcagcagctcttccgcagaatgaatcccgagaagatagttgagcaggccattgtcgtggaaatagatgtcgttcggcgttgacgcgtcatagaggtgaggatagccgccgcggaacatgaattcgtccgcggtgaggtcgggttccggctgaatcgcctcctcatgcgagaggggcggcagttgaagcatgcccatgcgccccgccagagattggcccaatgcgcttctccaggaggaagttttgcgagccggacagcacgtattgccccatgccgcctcgttcgtcggccgcgacctggatctgcgagaacagtcccggagcatgttgcgcctcgtcgatgatgagtttcgcgccgtgtgatcgaatgaacccgaccgggtcatcgatggcgctgatgcgagtggtttcgtcttcaagattgacgtattcgtaatcgggcagcatgttttgatgagcgtggatttgccgctctgacgtggtcctgtcactgagacgaccgggaaccatgacagcatcggggtgagctcttgcgcgatggtccttggtagcatcattgcctcatttgcaatttcatcaatacagtgtctgataattcatcaataggattcatgcaaattcatcagtaggattcgtgataatccgtcagtgcatgtcttatatcgttgcaatatttgttttttttgacagtctttgtggctcaattgacgtgagccgtttcgccatcctcgatgatggtcggtggagatgcagcctaacgtatctgcatcgtgccgtctcgttcgatgttaccgcataacgcttttgttgactagattggttgggatattttggagtctatcggatttcgtcggtggtcaagagcccgtcccaaaaccgttggaaatcctcgcgacacgccgtgagttgcagtgggctggatattgccgtatagttttcatctgttgcgcggcacgccgcacagcggataactcaagcccccatcgtctagcggtctaggactacgccctctcacggcgccaacaccggttcaaatccggttgggggtacgaaggtgctataatcctaatcggttacagcatctagccaaattgggatgtggtgtaattggcaacacagctgattctggttcagccattcttggttcgagtccaggcatcccagcgaatgaagctctcgcggaagcgggggcttttttgtttcccggcgcattcagccggcggattcgtggcctataggccggatccgtccaaaatacgggttgaaatcgccgaaatctactattccccgtgtgaaatcgccgtttttgaaccttaaaacggcgatttcacacggggaattgccaagaacggcgatttcaacccgtaattcagtgtcccggcccgctcaagacacgccatggtgctgtcaggcacggtcaaggtggtatgtactacgctgtgagttatgacggatttcaaccagattgcagcgccggcatccgctagcggccccgatgacgagcgcccggtgtccatctcggcgcgtctgggacgtctccagttccaccgttccggcaagttccgcgtgttgcagctggcggacatacaggatggtccgaaggtctccaaagacaccatccggctgatcgaggcgtcgctggacgccgcgcgccccgacgtcgtcatattcaccggcaaccagatcgccggatacgacgacgcgtaccgcgacacgttccgcaagcggcagtgggagccggcgcggcgcggcaagatcgagcgcacgcgggccaaggtgcgtgccggcatcagtgcgttcctgcagccgctgatcgaccgcggcataccattcgccgtcacctacggcaaccatgatgcgcagtgcgggctgagcccggccgagctggacgcgctgtaccgtgagttcccgggatgcatcaacccgccgtgcaatatggacgattccgccgcgaatcccggcttcctggtgcgttcggtgccgtcatccggtttgccggatcagccagtggccgcatgcgagcccggcacgttcgcaatgcctgtcctggatcaggatcgccaacgtgccgtgctgggtctggtggtgctcaattccggcgattacgcacgggagggcggctatggccggccgagcgacgccgcgctgcgtttcgtgcacgacgtgccgcggtggctcggcgtccgctccctggtgttccagcatatgccgttgccgcagttttatgacgtgctgaaggtcatgccggcgaacgccgataacgccatacaggggtatcgcaagtacgatgcgcagtattacgtgctcgatgatgaccggacgctcccgggcggctatctgggcgaaggcgtgagctgtcctgacgaggattgcggcgagttcgccgcactgcgcgacacggacggatatataggagtggttgtgggccatgaccatcgcaatggtttcgtcggctcgctcaacgggatgatgctggtggcgacgccgacctgcggattcggctcgtacggaccggccgcggcgaatcgtgcggcaagactgttcgagttcgacatccgccacccgtacagcccgcggacgcagctgctgacattcggcgagctggtcggaaaaccgagctccaacaaggcgtacacctatgcggtcgaagggcagtcgaacgccgccgatggcgtcaatctgctgaggaaacccggcctgctcgccggggtcgctgccgcattgaagaagatctgagcaaaaagggacgcccccgctgacgggctgagtcgtcaggcattgtctgatgccaaggagcgcccccgccagcgggggcgctccactgatccgctgcgctcgacagcctgctgggctctgcgcccgtccgtcgccggcgccgtcagcgaacggagctggccttgagcagggcgtcggtcaggtatttgccggcggccatgaccagcggggcgtaacggcgcccgggcgagttgcccatacggcctgacgggccggaaatggaaatcgcggcgatgacctgaccggaggcgttgcggatcggcgcggagatggagcagacgccctcttcgcgctcgttcaccgattcggaccaaccgcgcttgcgcacggcggcgagcttcgcggcggtgaacttggcgtgcctcagcccctgatgcagccgttcggaatcttcccaggcgagcagaatctgcgcggccgacccggcctccatcgacagcatcgcgcccacgggaatcgaatcgcgcaggccgctggcgcgttccaccgcggcgatgcacacgcgctgatcgccctgacggcggtagatttgcgcggattcgccggtccggtcaagcagtgtctgcagaatcggccccgccgcggtcagcagacgatcctcgcccgctgcggcggcaagctcggcgaaacgcgagccaagcacgaatcgtccgtgctgatcgcgcagcacgaagcggtggcgctccaacgcgatagccagacggtgggcggtcggtcgcgccaggccggtggccgacaccagctgtccgagagtcgcgggaccggattccagcgcgtccaaaatcttcacggttttgtcgagtacaccgacgccggaatggatctctccgctgatggtgtactcgatggcgtccgctgtcatggtgctggtcacggtgccgtcgtcatgcatctcgtcgtcggcacgctgtcgttcatcggccatgcttgtggccagtggttgcgtcagagaagtcataatgaagcattatgccatctcacataatgaaatgcaaaagtaacgtagacgcttttctgttaatggcaggccggtaatatcgcgatattttcgacaagaaccgcaaaaaacaagaataattcaagcatcgccatgttttcgccgttttatggccatgtatttatctcatatatcggcctagggaagttctcaacgtgcccttgcccatacgcttattaccacataaaaagcgtgagggcaataccttgcgcgaggaaatttgaggaggtcccgaatgggaaccacattggccgagaaagtctgggccgaccatctggtgcggcaggggagcgacggcgcacccgatttgctgtacatcgacctgatgctcatgcatgaagtaacgagcccgcaggcgtttgagggtctacgtctggccgggcgcaagccgcgtcacgtcgatcagctgatcgccacagaggatcacaacacgccgacggtcgacatcgaccgtccgaacccggacaagacatccaccctgcagctgagcacgctggaaaagaactgcaaggagttcggcgtgcggctgcacccgctgggcgacgccgatcagggcatcgtccacgcgttcgccccgattctgggcctgacccagccgggcatgaccatcgtgtgcggcgactcccacacgtccacgcacggcgcgttcggcgcgctcgcgttcggcatcggcacctccgaggtcgagcacgtgatggcgacgcagacgctgagcctcaagccgttcaagacgatggcgatcaacgtgaacggcaagctgccggcggacgccaccgccaaggacattattctggcgatcatcgcgaagatcggcaccggcggcggtcagggctacgtcatcgaataccgcggcgaggcgatccgcaacctcacgatggacgaacgcatgaccgtgtgcaacatgtccatcgaggcgggcgcccgcgccggcatgatcgcgccggacgagaccacgttcgaatacctcaagggccgtccgcacgcgcccgaaggcgagctgtgggatcaggccgtcgcctactggaagacgctcaagaccgatgacgacgccgtgttcgacaaggtcgtggacatcgacgcgaccaagctcggccccttcgtgacgtggggaaccaaccccggccagggcctgccaatcaccgcgaacgtgccggagcccgacaagatcgccgacgccaccaagcgcgccgccgccgagcgggcgctgacctacatgggactcaagcccggcatgccgatcaaggacatcgccgtggacaccgtgttcatcggctcgtgcaccaacggccgcatcgacgacctgcgccaggccgcctcgatcatgaagggacaccacaaggccgagaacatccaccgcgtgctcgtcgtgcccgcgtcctcgcgcgtgcgcctgcaagcggagaaggaaggactcgacaaggtgttcgaggacttcggcgccgaatggcgcaacgccggctgctcgatgtgcctgggcatgaacccggacaagctggtgccgggtgagcgctccatctccacatcgaaccgcaacttcgaaggacgccagggcaagggctcgcgcacgcatctcgcgtcgcccgccgtcgccgccgcgaccgccattcgcggcacgatctcgtcgcccgccgacctgtaaatactgcacactggctcccgctggcagcagctgtcagtcgaagactgactgagggtggggcggagtgtcgcgcactggcgccccccccccagtcagcaaagccgacagcctccgccagcgggggcaagaattgaaagcctgatatccatggaaaaactcaccacattgaccggcgtgggcgtgccgctgcgccgctccaacgtcgacaccgaccagatcatccccgcggtgttcctgaagcgcgtgaccaagtccggtttcgatgacgcgctgttctacgcctggcgccgcgacccgaatttcgtgctgaaccagccggaatatgccggcaaggggcagattctcgtggccggccccgaattcggcatcggctcatcgcgcgagcacgcggtgtgggcgctgcacgattacggtttccgcgtggtgatcgcgccgagcttcgccgacattttctacggcaacaccgccaagaacggcgtgctggcggccatcatgccgcaggagtccgtcgaactcctgtggaagctgctggacgaggagcccggtcgtcagatgaccgtagaccttgagcagcgcaccgtcacctgcggcgacgtgacgttgccgttcgaggtcggcgattacgtgcgctggcgcctgatgaacggctacgacgacatcgacctgacgttgcagcatgaggacgacatcgccgcctacgagaagatgcgcgccgagaagttcccgttcaagcccaagaccatccccgccaagcattgggccgaggaacccatccagtccgcccgcgagcccgaagagagcgactgggcgggcccgctgagcgaccgcggcatcatctgaccgatctggccagcctcagccagcgatgcctttgcgccggtgttggttgagcggagtgaaacctgttaatgtcgtatccgtatatcgaccgggatgttggccggtcatgatggcatgcacgggcgtgattgtcgcccgctgcaacggaaggggcattgatggattggcatgcgtccgtgtatggttcccgctccggcggcggccagtaccgcgacttctccgacggtgatgccgacgatgacggcgtcacgtacggcgctcgcggctcgtacgccgacatggcagacgacactgccggtgccacgccgctgccgccctccgtcgacgacgccgaactgcgccggctcggcggcaacgccgtgttttttcgtgcgaaggacgtgctgaaatccgggcgtatgcacgacatggccgtatcgttcaacgtgccggattcgccacgtacctcgggcaccatgctgacgggcgcgcgggccaacgtacgcctgacagcgctggtcaaaggcgccgaccggtacgcggacgattaccgcgtctccgccgcgatcgacaccgacgcgggcaaggtcggccagtcatcgtgcacatgccccgcatacggccggttccggggcgtgtgcaagcatgtcatcgcgctggtcatggcgtacaacgaacatccggatgacttcgccgcggccgacgacggtaacggctccacgaacggtatcggtcgcggagccgcaggcttggttccccggcaacctgccgtgcgcacgacccgcgcgcttgacctgttcatgcggcagcaggacgacgagcgcacccgcagatcgcagagccggcagctcgacctgttgaaggaaatcggcggactggctgattccggaggtgtcgccggcgcagcccagacggcgcggttcatgcccatcgccagcgtgtcgctgcggctctccttgagtttctcgctgaacagctgcgtggcgaaattccgcatcgaagtgccgtcgcgcggcatctcctatgtggtcaaggacatcgcctcgctgctgcaatccgtgaaaaaccgcgagttcgtcgcatacggcaagaagctcgcgttcgtgcactcgcgcgacgcctttgacgagcgctcgcggaacctgctcgacgtgctctctcgcgcgcaggacatccgcgccgtcatcaacaacgacaacagcgcatactcctactattaccggcgtcagtcggatgacgcgacgctgacgttgtcggacggtgaggtcgccgaactgctcgatacgtacgtcggcaccgaagacacggtggaatacacggctccggcacggttctacgcgccgacgatgcgcgtatcagtcgtggacggcaatcccgatctcggccttgcggtggaacgcggcgacgatcccgaggcctcgaacggcagtacggcggcggccggttacgtgatacggcatgcgcagcgcgtggaacgattcattgaaggacagcgctcgcattacgtgatcgcgcggccgttttcccaagccgaatcgggcgcgggcgtggggtcgggtggtcgggcgctgctgagcgtcgatcgtgcgacgatataccggtgcgatgccgattttgcgcagaaacgggcactgctgagcctgctgtgcggcgaaaacgatcgcgaggcgatgtatctgagcgaaagtgatgtggatcgtttcgtgcgcacggtactgccgcaactggtctcccgccaggagaacgaggtcgggcggtcggtcgacgccattggcgcatccgccggtccgaacgcggaggacggttccgccgcgtcatcggtctttgaccggctcgtgccgccagctgggcgtgaaaccggagttccggcgcacggcggcttgatcatcgacgtgccgcccgagctgctggcgaaaatgcgcgtgccctgcaggctcgcgttttacctcgaccgcgaccgcgccggggtgacatgcgacgcgcaggctcattatggcgacaagcattaccacgtgttcgacggtgtcggcgtcgacgcgtccatgcgcgacaaggagatggagcgactcgcagtcgaggcgatgctccactatttcccgcgcccgtccggtgccgtggccgccatccccgagtccgacgacgaggcgatataccgtctgctgaccgaaggattggcggtgttgcgcggtttgggcgacgtgatggcgacgcccgcgttcgacggactgaccgccatgccgcgcccgacgatctccataggcctttcggtgaaatccgggctcgtggagatatcgccgatcgccgacgaaatcgacccggacgacgtgccgggcctgctggcgagctaccgtcggcgccgcagattccaccggctgcgcaacggctccttcgtcgacatgcgcaacgtggatatgtccgacgtcgacgagatcgcggatgacctgggactgcggaccgccgatctggaatccggctcgatcacggtgcccgcctatgaggcgtactatctggaccatcaggtcgacgacgacgcgaaggacgcaagcttcaccgcatacctggacggcctgcgcgtgatcgatccgtccacgtaccgcgttcccgctgcgctggcctccgtgctgaggccgtatcaggtcgaggggttccgctggctcaatgccgtgtgcgacaagggattcgggggtatcctcgccgacgagatgggtttgggcaagagcgtgcagctgctgtcgctgctgcttgcacggcacaaggagtcccgggccgagcaccgtccgaatctgatcgtctgcccggcctcgctggtgtacaactgggtagccgaggtggcgaagcacactcccgagctgcgcgtggaggccatcgccggcaccaaaccggaacgtcgcgcgatgcttgacggcgtgcgcgccgcacagcaggacaccggtgtgtctccgacgcgggaatccgcaaggccgtcgtcggccgcggccgcgtccgacgacgttcccgacgtgctcgtcacctcgtatgacctgctgcgtcgcgacatcgacgactatgcgggacttgagttctactgcatgacgctcgacgaggcacagtacatcaagaacgccgctaccaaggtgtcgaaagccgtgcgctccgtcaccgcagtgcatcgtttcgccctgaccggcactccgatcgagaatcggctgagcgagctgtggagcatcttcgatttcctgatgcccggcatgctcggctcgtacgcgcatttccgcgaacggttcgagatgccggtgctgagcggcgacgagaccgcacagaagaaactgcaatcgttcgtggggccgttcatcctgcgccgtcttaagtcgcaggtgctcaaggatctgcccgacaagatcgagaacgtcatcacagtgcagctgcagggggagcagcgcaagctgtatgcggcactggagcagcagctgcgctcggtcatcctgaggcagcgtccggccgatttcaacaccggcaaaatccagattctggcgcagctgacccgactgcggcaagtatgctgcgacccgcggctgatatacgagaacgccgacgggcatgccagtgccttgagcgcaggggtgcaatccgccgcgaaagacccacagcagtccgtgaaacagcctgtgaaacagtcgaaggcgcgcaagaccgtaagctccgcgaaactggacgccatcatcgaactggtggactcctgccgtgatgccggccgcaagatgctgatcttctcgcagttcaccagctacctcgacttgatcgcgcaacggctgcgggccgacggcgtggaatacgacatgatcaccggagcgacgccgaagaaacgccgtctggagctggtggaccggttcaacgccgacgcgacgccggtgttcctgatctcgctcaaggcgggaaacacgggcctgaacctgaccggcgcatgcgtggtcgtgcacgccgatccgtggtggaacgcggccgcgcaggatcaggccaccgatcgcgcccaccgcataggccagacacaggacgtcaacgtgtatcagatcgtggcgaaggacacgatcgaggagcgcatcctcaacctccagcgcagcaagacagacctcgcgcaacggttcgtggattccgcgtcctccgccaccggacggtcgatggccgcgctcaccaaggacgacctgctcgccctgctgggctgaaggtttttccccacgcaacagtcaattcgtcgcgataccatcggtgcttggatgttcgtaaaggaaaggacgtgatgagcgtgcgtaagaagctgatgagcgtggtcgccgcggtggcgacggccgctgccatgggtgcgaccggtgtcgctgccaatgccgctgatgttgttgccgtgccgcaggaggggctgtccgacacgggtgcgtcgatcgccatcgtcgtggtgcttgtcgtggtgctggccgcgattggcgtgggcgtcaccgtggcccggaagcgtcagagcgctacgggcgcacacgtgcagggcgaggacgagggcgccgccgagagcggactggtggccgatggtgctgatacggctgatacgcagaccgtgcagttcgatgatgccgctccggccgcggatgactctgacgccggttcggaggaatcccgcgactccgagtgattccggaataaccgcaatgtgcaaaaggccctcttcggagggccttttgcgctgacatggtgttttgccggtgttttttcccagtcggccttacggccggtggttccgtccgtaggcgaaggcgagccggccggcgagcgaataaggtcgcgcccgcaggacgggcgtccttgactgcagggcccgaagggctgtcgcgaagcgactgggggtggtcccacatcgtgagtgtgattcgaggtctacgatccgacgctatctgcatttcgaggggttgattcgacggccgcgaaacatctatctacgtttcgagggggtgccgaaacgtgatacctggagtattgagcgccaatcgccattggaaccatgccgttctggaggcgttcatacttggccaccaaccccctgaaacgcagatagatgtcccatgggactcgaatcaaccccttgaaagcgagatatcgccaatcaaggcttgaaaatgtcgcccacaggcatatcgggcccacatgagatgtcgacactgacgttgatgggcgatacacggcgtactgttgaaccatgagcatgaacgatcggcaacaggcccatgggcaacctgatgatgagatggaaccggaaggccagcggcagccggctgctggagacggaaaccccgaaaaactccagatgcctgccggtgacgccccgcagcaagttgggcagccgatgcaatggacggccggcgaaacgccgcagcctttgccgtattcacggcctgtgaatccgccgcaatccgtgaaccggcctcagccggtcggccactcgcagccgccggtggcgggacaatgggcaccggcttctgagccacgtccgatgcctccgattccgtcaggaacaggtcggccggggatgcgccagccgatccagtcgtatccgccatatccgtcacagctgtacccgccataccctccgtatcctccatattcctcggcgcaacgacccgtcgcgccgcccatccctgtcgcccagcccgtcccgatcgacccggtcaaggcccgccgccgctggctgcgaggcaccgtcacccgccacgcgggcctgatattcgcctaccagggcgtgttcatgggcgtgaacgtactggcctcgttcgtcatcggcatcatactgggcctgagcggagccgcggggcgaggaacgctgacggccgagtcgctcagcgccgtcctcgtgcagctgaccggcgtgatcatgctgctcacggtgctcggcggcatgggcttcatactgccgatgcgccgcaggatgatattccgtcgcgacttctggctcggcgagcccggccatgcgcgtatgaaaccatcgtggctgctgacgttcatcatcctggtcatggcgatccagacggcgatcgtcctgatccagctcggcttctcgatgttcggcaccacgttgcaatcgcccacatccgacaacatcagcgaggcctcgaccaacatttggatgtggctgtatgtcggccttgccgcgccggtcgccgaggagctggtgttccgtggcgtgctgatgcgcggcctgaagccgctcggccggaatttcgccatcgtgaccagcgcgctgatgttcggcctgttccatgacgatgtggtgcagggcctgttcgcgttcggctgcggtttgctgttcgggttcgtggcgatggagtattcgctggtgtggtcgattgtgctgcacgtgttcaacaacgccgtgctcggaggcgtgctgccgtggctggcgggcctgttcggcgacgcgggggacacggcgtatacgctgggacttttgggtgtttcgatcatcggcctgatcgtcgtgctggtgaaatacggcgggggattgcgcgcctatcggcgggtgaaccgcagcgcgccgggaacgtattaggggtggacgtcgcctgcgttcctaattttcgtgatcgtgaatgtggcgatcacgatactgtcgttcgtcaccgcgatgatgggcgtctgaccagcctggcagacggcctggcgaatgctcccggcgttgcgggtctgccgctgtttttacagtgggtatatcgtcgtgtttgtggcgccggcagcggtccggcgtcggttgagtgtctggagagccatgagtgatttcgagccgttttacaacgttgacttaagttatggggataattatgcgcgcggcccgttcggcgagttcgccgcggcgctgcgcggtgatgtgccggccggcgaggccgcttcgccggcgaagtcgtcgttccttggcatccccgttgacctgccgttcggcattccggccgggccgctgctcaacgagcggttcaccacggccgcgttccgcatggggttcgacatcgccacgtacaagaccgtgcgctcgcgcgcgtgggggtgtaatccgttcccgaacgtgttggccgtgcacccgaccagtgccgacggctcactgacgccgggcagcgccgaacttgatgagggcgtgcttgcggacacggactatcgcctgccgatttccatttcgaattcgttcggtgtgccgtcccgcgacccggatgagtggcagccggacatgcgccgggccatcgcggcggccggcccggggcaggtgctgctaccgagcttccagggatcgcgtgtggagggcatgagcggcgacgactatatcgcggatcatgtcgcaaccgcacgattggtgtgcgagaccggtgccgacctcatggagatgaacacgagctgcccgaacgagggtcataatcgcctgctgtgccatgacccgcatctggtcggccgcatcaccgaggccgtcaagggcgaaatcggcgaccggcctctgatcgtcaagctggcgtatatcccgccgaccgaggtcgagggtggctgggggccggatcgccgcgtgattgacgatgccgctctggagctcatggtgcgtcagaccgccgcccgcggcacggtgcaggcgttcagcacgatcaatacgatttcggcccggctcgtcgacgcgaacggcgggcaggcgctgcccggcaaggggcgcgaccgcagcggtgtgtgcggcagcgcgattcgcggggcaggccttgacatggtgtcgcgtcttgcggcgattcgcgagcggctggggcttgactatgcgatcatcggcgtgggcggtgtcgtggcgccagaggattaccgggcgtaccgcgcggccggcgccgatgcggtgatgagcgctaccggcgcgatgtgggatgccgagctggcccgcaagatcaaggcggatgactgatccgctgtatcagcgaatcgttctcaatagcgtttgtgcgagtactcctcacatttgcgaacaaaacgaacatcggcttactcgttggaatatcggccatatgcatacaatcatgttcgttttgccgacgacgggactcgcacgtttcttattgagaaccattcgctgcgacatggtaatcggcttccggcgcatttcacgtgcccgccacatgccgtatggcaaactaatggatgtgatgtccggggtggcccggcgaatgaataggagtgttgaggatggcggaatcggagaacgatgtcctgcatgtggtcggcggcaaaccgctgaacggcacgatcaaggtgcgtggcgcgaagaacttcgtgagcaaggcgatggtcgcggcgctgctcgcccccggcaaatcggtgctgaagaacgtgcccgagattcgcgatgtgcatgtggtgtccgatctgctgcgcctgcatggcgtggatgtggaggtggatggcaccaacggcatcgtcaacatcgacgcgacgcatgtgcagctcgccgatgtggcggatgtcgacacgctgtccggctcttcgcgcattccgatcctgttctccggcccgctggtgcatcgtctcggcgaggcgttcatcccggcgctgggaggttgcgcgatcggcggccgtccgattgatttccatctggaaacgctgcgcaagctgggtgccacggtcgacaaggagcacaaggacggcattcacatcaccgctccgaacggcctgcacggcgcgaagatccatctgccgtacccgtccgtgggcgcgaccgagcagacgctgctggccgccgtgctcgccgaaggcaagaccgagctgtcgggtgccgcaatcgagcccgagatcatggatctggtggccgtgctgcagaagatgggcgcgatcatttcggtggatgtggatcgcacgttccgcatcgagggcgtcaaggagctcaatggcttcacgcacacatcgctgaccgaccgcatcgaggccgccagctgggcgtcggcggcgctcgccacgcgcggcgacattttcgtcaagggtgctacgcagccggagatgatgacgttcctcaacgtgttccgcaaggtcggcggcaagttcgaggtgaccgacaggggcatccgtttctggcatccgggcggcgacctcaagcccgtggccatcgagacggatgtgcaccccggtttcatgaccgactggcagcagccgctggtcgtggcgctcacccaggcgaatggcctgtcgattgtgcacgagaccgtgtatgagaaccgattcggcttcaccaagccgcttgtgcagatgggtgcgacgattcagctgtatcgcgagtgcctcggctcgctgccgtgccgtttccagcagcgcaactacaagcattccgctgtgattttcggaccgaccccgttgaccggccgcgatatcgacgtgccggatctacgtggcggtttcagccatctgattgcggcacttgccgcgtccggcccgtccaatgtgcatggcatttcgctgattgaccgcggctacgcggatttccgcggcaagctcgccgcgctcggtgccgatttcgagtaacggtacagagagcctgtagggccccgatttccgctgaaggaatcggggccttctctgtgactgattatggtcgatgaaaaggatgccccgccgtcgtcagtcgtcgaagtgcgcgaacagcgacgcggacagcaacgccatagcgatgagcactgcgcctgacgcgatgaatatcgcggcggcggggagatgatcgaacgcccagccgtacgccatctgcccgagcggctgcatgcacatggccagcgcagacagcagcgccatcactttaccgagcatcgcatcgggcgtgcgcatttggattgcgggcacggcgatgatattcgcgcatgagcagatgacatcgccgatgcaggcgaaggccacgagcgccatcagccgcgtccagttgccgccagacagcatgcaggccacgccttgggggatgacggtcagtccgagcaatgtcaggatcttcgtcatatggccaattttcagccgtccggccatcatcgtcacgatgaacatgcccatcagggccgcgacgctgatcagtccgtcggcaatgccgtagacggtcgcgtcgaacccccattgcgtgcggatgacgaacgcgtatccgacggcgccatagccgagtacgacgaagttcagcgcggaggcgagcaggaccattttcagcaggttcggtttttcccgggtcaggaaccgcagagcggccttgaggtcgtcgagtggcgtcggcatctcctcgtcgcgttcgggcataccaagccggatgaagcattcgatggccgccgcgccggcgaatgccgccacggagacggccatcatcggccggatgccgaagaacgagtacacggcgcctccgaggaagctgggtatcagtgcgctgacctgctgcacctgactgactatcgcggcgctggtgttcagcgtcgcatccccgtattggcgcagcatctgcggcagcgcggattcgacggtcggcgtctcgaagataccgagcagcgatagcgccacctgcattacgcccacggcgatgatgctgaatccggcggcggagaaccagacgagcgcgagcgcgaccgtcacggcggacgccgcgtcgaggatgaccatgagcgtgcggcggttcatccggtcggccaacacgccgccgaacggggcgccgaggatcatcggcacgaacgatatggcgaggatggatgcgaatgcggtggctgagccggtctcgtccagcacccacatcgacatggcgaagcgcagcatcatgttgccgaacagcgagatgccttgcccggcgacgagcaggatgaaattgcgggagcgcagcggatgcgcggcctttggctgcgcttgcggctgcggttgcggttcgggggaagtgttgggttgctctgtttcgtgctgtgccgcgggaagctgtgtttcggagggttgtgccggtgtggtgggcatggtgggttcctttgctgctggtggcgagttggtctcggtgttttgcgttggtggatttggcgtgagtttgatggatggcacggcaatgtattggggcggacgattttgacgccggagttagtggttcatcggcaatcattcataccgactgacggtatgtaaatcggtgctggaacaggggcgaaacattcgtgccgcgtcctgccccggagtcagcgtcgtctagtgtgcgtcgcttaccggactggtgccgcctccatcttgttgctcggcggcgctgccgctgccgtcgccggcgaaggccatcatgccgtccgtggcgagatcgatgagatgctggtcgaagaccggcgcgtgcagcgcgtcgagcatggtggcgaggcattgcagacgataccgcagctgcgtgcgcgtggcggggaagaagcatggcatcagccaatagttgcatagcagggccagcagctgcgccacttcgcgcgggtattcggtggggatggagccgtccagctggccttcctcgatcaatggatcgaggtttttcggcagctcggttgaccagaatcgcatgttggcggtgaatgtggcgggatcgtcgaagaacggcacggtggccttgacgagcgccaggtgcgcggcgtctcccagcgagttggcgaacagcgagcggagcttttccatcgcgttcatgtcgtcgcgtttcgcgatctcgtcgcacagggcctggctggcgtgccagtcgtcggtgttcagtcgttcgaggatggcctctttggacttgaagtggtggtagatcgcgcctctcgacaggtctcccagcttatcgatgatgtcctggatggaggtcttgtcgtagcctttctcggcgaacagctttttcgcggcggcgaggatgcggcgttccgtcacctcggggtgcgggttgcgtgccatggttcctcctttcgatatgtcatcagtatacataccgacagtcggtatgtatactgcgtgtcatgattgcggccgtctgtagggccttttcggggtggcggcatcgcgcaaaatgggcaaaaccgtattagatatcggttatatgctatgttggtcaatgttgggcgttggcgcttgaccgaacgaaagaaggcacatatgacagatcccaatgccggtttccccactggaaacaactcttatggagccccgcagcccgctcagccggcttcggacgcaaacgcggcctatcagcagccgcagtacaccgcacccgtgccgcctgcccagcctgtgccgcctgcaggggcaccctatcaggcgccggcaacccccgattacgcggcgaacatccagaactccgtcgccggtttcgcccagaacctgggtggcaagaacgtgaccgtcggaggccagtcattcgacttcatttccatcatcacctacgtggccggcgtgctggcgatcatcgcctgcatcgtgccgttcgtgtcggcgtttggatacagcgccagcctgttccaaggcggggacggatggattgtcctcgttgcggttcttgccatcgcggcgctcacgttcttcaagaagcacctccccgcaatgatcatttccgccttggtgctggtactcagcatctttgagatggtgtattccaagatcaagatcaacagtagcttggacgagttcggcagcaactatggcagtctgggaagtctcgcgtccggctacgcgaagaatgcggtggctttcggtattggtgcatacttgctcatcatcgcggcgctgggcctgattgtcggcaccgtgcttgcgttcggcaatcagaagaaggccgcgaaggtcgcggtgccgggtgtttccgcccagccgcagtatgtgccgacggcattccccggtgctccggtcccggcacctgccgcccctgtgtccgatgccggcgttcctcaggctcccactgcaccgcaggccccgaccgcaccggtcgccccgactgcgtatgagcagccggcgcctgccgctccggtttaccagcagcccgattcggacgcttcctacccggggcagaccccgcaggcctgatttctaggtcttccgcgttccgcgcctgatcggcgtgaagcgtgaccaatgagccgctgtgcacatgcgtagcggctcttcacatatgcgacggatccgagcccaatgaccctgccgataatccgggaaatatgaacggccgcacgcacccgcgatgccgcgatattgtccgctctcataggcataatagaaaagttgtgtctggaggatacgtgtatgcgaatccgctagcacagcacagcaatatacgttgcgggaggaatccgccgcgggcgaccgccacgggtgccgacatcaccgcttcatagaaagaagaaccatacaatggctcccaagaagaaagtctcggcgctgatcaagctccagatccaggctggcaaggccaatcctgccccgccgctgggtccggctctgggttcgcatggcgtgaacatcatggacttctgcaagcagtacaatgcgcagacgcaggacaagatgggtcaggtcatccctgttgagatcaccgtttacgaggatcgctccttcaccttcattctgaagaccccgcctgcagcggctctgctgctcaaggccgccggtatccagaagggcaccgaaaacccgctgacccacaaggtcggctccgtcaccaaggcgcagctgcgcgagatcgccgagatcaagatggctgatctgtccgcccgcgacgtcgaggctggcatgaagatcatcgcgggcaccgctcgctcgatgggcatcacggttatcgactgagaggagaaggacacatggttaagcgttccaagaagtaccgcgaagcggctgagaaggtcgatcgcaacaacctttacaccgccaacgaggctatcgctctgctcaagtccatgccggcctacaacttcgaccagaccgtcgaagccgtgtaccgtctgagcgtggatccgcgcaaggccgaccagctggtccgtggcaccgtcaacctgcctcacggcactggtaagaccgccaaggtcgccgtgttcgcccgtggcccgaaggccaccgaggctgtcgaggccggcgccgacatcgtcggtgacgacgacctgatcgagaaggttcagaacggcttcctcgacttcgacgccgtcgtggccaccccggacatgatgggcaaggtcggtcgtctgggccgcgtgctcggcccccgtggcctgatgccgaacccgaagaccggcaccgtgaccatggatgtcaccaaggccgtcaaggacatcaagggcggcaagatcgagttccgcgtggacaagaacggcaacctgagcttcctcatcggcaagctctccttcgacgagaccgctctggacgagaacttcaaggccgttgccgacgaagtcaagcgtctgaagccggccaccgtcaagggccgttacatcacgaaggtgaccatcacctccacgatgaaccccggcgtcccggtcgatccggtggctctcgcctgatcaacgccaatcggctcaaccttcatagggggcttcccgcacgcgcgggaagccccctatgtcgtatttcgattccctactagactccccagtttcgctgcgcttgacagccagcgggggcaaagtaaaccgcccgccgctggcgggggctgtcagtctttgactgactgggggtggttcttgccgccgcatatacaaaagccgcccggcacacacatgcgccgggcggctttcagctactgtcgcggtcgcctgtcagtaggcggccagaatatcgaccacgaagatcagcgtggagttcgcggggatggagccctgggcggtgtcgccgtaacccaagttcggcggaatcaccattagcacctgcgagccgaccgtctggccgaccatggcctgctgccagccctcaatcacctgatggttgccgccgctgtacgtgtcggcctcaagcgtggtgttcttgtcccatgacgagtcgaactgggtgccgtccaacagccatccggtgtacttcaccttgacggtgttgttgttcgtgacctctttgcccttgcccttgatcagcgcctgcgagaccagcttgctgcttcccttgtacccgttcatgttaatggacggcttgccgttcttcgctcgcgtgaccttcggcagatcggacgggatgtcggtgacctcgttgcctgtggccttggtgagatccttcgacttggaaacgtaggtcagcgccatgatgtacgacgtgccgctggagttggagtcattgacgccgtacgcgatcgtcgtgttgagcttgcggcccttcagcagctcatagtaggcgttgctcaccgtgcccttttccagcaccagggagcaatcgggtgtgttcttctcccagctgctcgcaagctcggtgccgtccttgacgctgatggcgatgccctgcgagcacagacggtcgccatcagcgatggtggcgccgttgccttcctgcagcacggcatagctgttgttgtcgacggtcttcggtgccttgaaggagaccttcggtttctcgcccagcgtacccgtggcggtgatgccggcgatcttcttcatgttcttcaatgcgctggagtcggaggactgcgaggagtcgtcgccggatttctttgacgacgagccggaatcgccggagccgcacgcggcgagtgtgacgcacaggccggccgtgcacacggccgcgagtacgcgcttgaacgtggatgtctgtgtcaacttacgcatagtcaccacactagcggaaaaccctgatttttctttggaaacgtctttttcgccagggctttatgccctgcattgtagaatgggtgagttatgaagaaacagacatcaaaagagcgcaagcgtgacgagcgaaagtccaagtcggccgcccgtccgacgcgccatgcccgcatcatgcggggcgtggtgacgcccatccttggtcttctggctgtggcatgcattggtctgggcattatgaacgccacatattggaagcccagctctcagatcgaggccagtgccgcggtgaaggggacgcaatatattgttaccgatcccggcgtgctgccgctggtggacaatcaggtgacggtttccgccgatgccggttcgtccgacggcgaagtatgccttgctctggggtcgaacaaggatgtgatcggttggctcgccgggcagccatatgtgcgcgtcaccggcttgaacgaatggacgacgctcgcgacgacgaaggtctccgcgcaggggtctgcggccgatgcgggcgatgacgcagtggcgttcaaggactccgatatgtggacttccgtgacgtgcgggacgggcaccgtgaaaacggagaccaaggtcgcgtccgacagcggtaccgtagccatcatcgacttgggcaagtcctcgaacgcgacggtgcgcatgaactgggtgcgtcagactctacctgatttcgccatgccgttctatttcgccggaggactgctggcgctgctggccgtactggccgcatctctgttcgccatgccgccgcacaagcgtcgcaagcgcgtggtgagtggttccgcagccgaaaagcaggcagaggagatcgccgtttcgcaggcggtggcgggcagtgtcgcgagtctcaaggcggcggtcagtttcaagccgaaatccaagcgccgccgtcatgccgcgcatcgtgggaaacccggtgcgggcacgccggcaaagccggaaatctcccagccgaaggtcgtcgatcccggcagccgcaaccttgtcgccgaccagcagaacgcgcaggccatggaccagcccgacgattcggcgacgtcggtaatcaccgccagcgagctgcagacgtatttcgcgcggctttcgcaggaatccgatgatgacacgaaggggagctccaatgaataaacgcataaccaccgccctggcggcgacgatggtctgcgctctgacgctcggccttgcaggctgcgaggggcaggtgccacagaccgtggcaccgtcggtgaaggacaacgagatcatcgatgtgaccgtcgcacaggagaagcagatccgcgggaagatccttgacgtgctgaaccaggcgaacgaggcgaaaagcgccgacgggctcgccgcgcgcgtatccggctcgcaactggagatccgcaccgcccaattgaacattgcgcaatacacgcagcaggatgtcacgccgttggcgactatccccagtgatgtgacgcaggtggtcatcccgaccgacaacgcatggccgaggtatattttcaccgtcaccaccaccaccgaggaccagcaggcgaagcgtctgctggtgatgcggcaggagtccgcccgacagaactacaagctgtgggctgtcgcccgactgcttgaggacgtgtcactgccgggcttcgcgcccgctaagcagggcaatgtcatgggcgatgccaacgactccaatctggtcatgacccccaagcaggcggtgcagcgatacgccgatgtgctgcagaacaacacgaacagcaaatacgcgggaagcttcgaggatgaccagttccgccagtcgctagtcaagcagcaggaagaaagccagaagggtgtgacccagaacaagggcacgcagcaggaggtgttcgcgccggtcgtcgaccagatcgccgtgatgcgctcccctcgtggcggtgacctggtcgtcgcgcagatcaactcggagtggacacggtccatgagcgagggccgtgagtcgttgccggggtccccgaacgaggatgcgctgttcaagatgacgaatcagaaggccaccagttcgctgaaagccacttatgtgaacgttgtggcgatatttgtgccgctggccgggtcggatcagaaggtgaccgtggtggcgggcgatcgtcaggcggtcaaggtcgaggcgcagtagacgccggactcgggccggcgcacggacttgccaagcaccggaatcgggcgcttgcagcgtaaccggaggcggtgagacgccgtggcctatatagtggtatgcgtcaacgatgttcgcgacggaatcgacggtggtcgcaggtatgcggccgcgccgattttcgcgcggaatggatgtgacggaacggcgtgcggcgcagaccgcgggccggtatgagtcgtgaaaacggaggcatgatggcacagcagcaggagtttcatccgggattgtcactcgcgggcgcggtggatctcgaatcgttgaagcatcaggtgaaggcggagccggggcaggccgggggagcgccggccgcgggcggctatgtcatcgacacgaccgagaacacgttccaggcgatggtgcagacctccgccacgttcccgatcctgctgctgctgtggatcccgaccgatgaccgtctgttcccgatggcccgtacgctcggcgacgcggtgaacaagctcaaagggcagattcagctgtcccgcatcgacatcgcaagctacccatcgatcgcgcaggcgttccaggtgcagggcgcaccggcgctgttcgcgctgatcggtggccgcccgatgccgattcttcaggggctgccgggcgatgacgagctgaagcagatcgtcgatcaggtcatccccaagctaatttcggtggccgcgcagtccggcgtgaacggtactgcgccgtattccggcgacccggactcggccgacggtgacggtgctggtaccggtgacggcgcaggtgcggcggctggtgccgacgtggtgccgcccgagcatcaggaagcgcaccagcttgcggcgcagggcgattacgccggtgccgccgcggcctacgagcaggtgttgcaggcgaaccccaatgacacgctcgccgcgcgggagcgcgcgaaggcgctgctgttggcgcgttcggcgaccgctgacgtgcgcgaggtacgcaaggccgccgcagatcgtcccgatgacgtcgaagcgcagctggccgtggcggatgtggacatgatcggaggccagatcgaggacgccttctcccgtctgctggattatctggcggacggtcacaccgatcaggtcgagccggtacgcgagcgtctgctggagtacttcatgattcccgaagcgaccgatgagcgcgtcaagcgtgcccgtcgccgccttgccacgctgatgtactgagcgccatcgcgccgaaatatgtcattatgctgaaaccgccgcggtgccaattcttgcatcgtggcggtttcagcggttttgggcctgtggtctacgccttatagtcccatgcggttacggccgaactgggtttggaatcggggcccgtcccggtgcagctcggcgtcgaagtccgcggcccactgcgagaacggccgcgaagccagtccgtcgttgctgaaccgcgcctgatcggtgatctccgtcacgcagaacgatggaatctgcagattggtcacgggtccgctacgctccgcctcggcgacgaccagcggggcgttcgcgccgccaaatatgtcgaggctccatccatcctcgccgatccatgcggagaaccggttcttgataatcggacagcctccgcgcatcaccagttccgcggctatgcgggcgtcgatctcccgttcggcctcataacgggtgccgcccaccgacggccccttgacggtgacgaacgcctcggtgaaccggtctcggtattgcctcagtacggctatcggatcggtgtcggcgttcatatcgatgcgcaccccgtgtgtctgtagccgcacccgcaacgcgtaattaccgtcgtgcacataatagctctgcacgatcagcatcggctcgccgtcatccagttccggcggcagcgccctgcagaagaaccgacgttcatattcgaaatcgttcatggcgatgtccataccactccagtgtagtcggtgcgggagcgcgtaaacccgggaattccgcgaaattgtcgacatgttgggagtgggatggtgtacagtaatacagttgcttgccgcaaggcgagcgatggctcgggttcgtagctcagtggatagagcgtctgtctccggaacagaaggtcgagggttcgaatcccttcgagcccaccagcaaaggttccataccatcggcatggagccttttttcgtggtctatctgcgtttcgagggggtgattcgggatgcgccggacatctatctgcgtttcgaggggttggtagccaagtataaacgctacgggaaccgcatgattccagcaagaatcaggtcggaatactccgcatatcgtgttttggcaaccccttgaaacgcagatagatgtccccagactgcaaaatcaccccctcgaaacgcagataggagatgttgcggcgaaagccggtcgcggcggttgtctccgcctcgcgaccggtcagctcttcttgggggcggtggtgctttcgcggacgaccaggcgtgtgggcaggatcaggtagtggtcggcgacggagcctgcacgcgcgtcgagaatcatgtccacggccttgcgggcgatcatatcgaacggctggctgatggtggtgagcgccgggtacaggtattgtgccgggtacacgttgtcgaagccgacgaccgacaggtcagcgggcagggacaggccgcgttggcgggcggcgcggtacacgttgagcgccgtgatgtcgttgcatgcgaagatcgcagtcggccgtttggcggcgggcaggtcgagcagttggcatgcgcactcgtagccgcgttccggcatgtagtcgccgtaggcgaccagctcgggatccagctggatcccggcgcgacgcagcgcggtggcgtagccactgtagcgggcctgagcggattctgcgttctgcgggccggtgatgatgccgatgcgctgatgaccgagtttgatgaggtgctcggtggcgatcagcccgccggtccagttgtcgatgcccacgccgagcgtgtcctgcgacccttcgccgatggagtcgataatgacgaagggaatgttgcgcgaacgcaatagtgttttttcgcgttcggtcgcgttggacagcagcaaaatgacgccgaggggattgcggttgaggatttcccggaagctttcctcgctgcgcttgccccgcccggtctgcgtgatggtgatgccgatgggcatcgatttcacatattcggaggtctccgcgatcatcgcgttgataccgttcgccatgacctcggtgagcacgagctcgatggtctgtgatgtcttcgtggtgacgagagacttggagtacccggattcctccatgattttctcgatgcgcgcccttgtggagctggatacgccctctcgcccgttgatgacctttgatacggtcgcggtggagactccggcaagcttcgctatctcactgacccgcggttttttcatatcgcctgccatcggttgctccgtttctcccgtacttcattgtgggtgtgtctgcgttcgttgcagacgcacttcacactatagtaaagcgtttcgagatagatgaaagaaaatttctagaataagtgatgatttttctaaaaaaagtgtatgatgggaacgaaacgcaatacatcgagaaccattgaggcgaaggggccaacatgagcaccatcatcggagtcaaaacctacgacctgcgtttccccacgtccagcacgctgtcgggctcggacgcgatgaacaaggaccccgattatcctcggcatacgtcgtcatcaccaccgacgcggatggcggcctgagcggcagcggcttcgttttcctgtcggccgtgtcactgtcggccgtggcaacgacgtggtcgtggctggcatcgactcgctctcccgcatgctcgtcggccgcaacgtcgagaacctgctcgacgacatgcgcgccgcatgggacatgttcgtccacgactctcagctgcgctggctcggcccggaaaagggcgtcgagcacatggccatcgggcgtcggcctggcctcgggcgccgtgctcagcgcgccatcgacccgatcgcggccgccaccggcgagcagatgcagaaccgcatcatggacaagcagtatcggcaggcgggcagcttcaaggtcatgcagatcgacgccacgcgcgtcgccgggccgcaggagatcgtgctcgaatacctgctcgccaacaagttcggcgtgcgcgtgtgcccccacgccggcggtgtcggcctgtgcgaggcggtgcgccacttcgccatgtccgattacctggcggtcagtggacaatgggatgatcgcgtcatcgaatatgtggacaaccagcacgaatacttcgtgcatcccactgagatcgtcaatggtcgttacaaggccccgaccgctccgggctcgggcgtcgacatgaaactcgaagccgccgaacggtgcctgtacaagggctgatcgcagcgccgcggtgccgcggctcgcacggacacgaacacaacaaaggacactgaaacatcatggatttgcatctggaaggcaaggtcgtcatcctcaccggcggtttcaagggcatcggcaagggcgtcgccctgcgactggccaaggagggggccatcgtggcggttatcaaccgagacgacggcgccgccgagcagttcgacgccgaaatgaaggccatcaccgacaactaccgcacgtatctgatggacctcaacgacaccgacgacatcgcgccgatcgtcgaggatgtggtgaagacctacggccatatcgacggtctggtcaacaacgcggaccgcaacgacaacctcgacctcgaccacacctcgtggcgcgaattcgagcagtcgctgcacggcaacctcacgcactattacgagctcgcccaccgctgcgccccgtacctgcgcgaatcgaagggcgcgatcgtcgacatctcgtccaagaccgcgctgaccggccagggcaagaccagcgcctacgccgccaacttgctcgtgttcgacgcctccaagggcgtccacttccacgacgaggtcttcaaggacaccgtctacttcatgaacaacgtgttctgcaacacctccaccacgccgacgcagtggtaccgcaagaccgacgcgctcgccaaggccgcgttctcgaacaacgactactacgaggccggcggcaaggcttcggacacccagcctgaggacaagcgtggtctggaagtcgacccgaagttcgtcggcttctccggcggctccgacaccccggccggcaagctcgccggcatggcgccgaagccaaggccaacctcgacaaggcatacacctcctccaagctgcgcgtgggcctcgactccgtcaaggccggcgtgcagtgggcgccgacgatgagcgagatccaggtgcacaacggctccggttctgcctcctcgcacaagccggctgtcgccgtcgtcaacagcaacttcaacaagcaggctcctgagacgctgcccgagtacaccgtcacgctggacggtgacaagctgcagtccatccgctggatcggctccgaaggcaacgtgctgagcagcctcgacgagggagactacacggtgagcggcgagggtgacaaggtcacggtgaagatcgccgccgacttcctcaagggcaaggacgcgggcaactacggtctgcagttcgagtttgcgtccgtcgccccccgcaaggtgtcgctgaacgtgaccgacgaggcagtcgagccaagcaagccgacgactccggccaagccgggcgctaacgagcagccgaagaccgaaggcgtcgcgaagaccggttcgtccgtgcccgccgtcgccgccggcaccacgatgatcgtccgcaagcgtgccactcgctgaatgacacgccgtaaaggccggggccggtaactatgtgccggctccggcctttgccggtacgatggatataatggatgtcttgccgttgcgataacgccgcggcagacaaaatagaagaaacgttccagagcacagaaaggaacattgatgtcaacttctggccgttttacgattccgagtgaatcgaacttcgcggagaagaccgcggaactggcccggttgtggggtgccgacgcggttcgcaactcggatggcacgcagttggacgacgaggtcgtggcgctgggtatgaaggtctacacggcctacttcccgacccgcgcgcacaacgagtggatcacgctgcacatggacgagaccccgcaggtgtacctgctgtcaaagcgtgcgctggcggagagcgacacggtggacgtgtctctgatggacggtttcttcgaggagcagctcaagccgaacttcgacgccgacccgcacaagtactgggaagtcgtggaccgttcgacgggcgccgtggtgccgaccgagcagtggaccgtggacgccgaagcgggcgtagtgcacgtctccggcgcggaactgatgcacgagtacacggtctcgttcctcgcgtacatcatctgggatccggtcgagatgtacaaccacctgacgaacgggtggggcgacaaggagcacgagattccgttcgatatctaccacccggcgacgcgcaagttcgtgttcgacacgttcgagcagtggctcaaggacaacccgcaggtggatgtcgtgcgtttcacgacgttcttctaccagttcacgctgctgttcgaccagaagcagcgcgagaaggtcgtggactggttcggctgcgcctgcaccgtgagcccgaccgcgcttgacgatttcgagaaggagtacggctaccgcctgcgtcccgaagacttcgtcaacgagggctcgtacaactccgcgtggcgcgtgccgcgcaagccgcagcgcgactggatcgacttcctgagccatttcgtacgcgcgaacgtgaagaaactcgcatcgctgtcgcacgaggccggcaaggaagcgatgatgttcctgggtgaccagtggatcggtaccgagccgtacaaggatggtttcgaggatctgggtctggatgctgtcgtcggttcgatcggtgacggcaccacgacccgcatgatcgcggacatcccgggcgtgaagtacacggagggtcgtttcctgccgtacttcttccccgacacgttctacgagggcaacgatccgagcatcgaggcgtgggacaactggcgcaaggcccgtcgtgccatcctgcgttccccgatcgcccgcatgggctacggcggatacctgtcgctggccgcgaagttcccgaagttcgtggacgcggtggagcacatctcggatgagttccgcgacatccacgaccgcaccgacggcgaggcggcccgcggcgtgctcaacgtggcgatcctgaactgctggggcaagatgcgttcgtggatggcctacacggtcgcccacgcgctgccgaacaagcagacgtattcgtattacggcattctggagtcgctgtcgggcatgcgcgtgaacgtgcggttcatcagcttcgatgacgtgctggagcatggcgtcgccgacgacatcgacgtgatcgtgaccggtggcccggtcgacaccgcgttctccggtggctcggtgtgggccgaggagccgcgccttgcggcgacgctgcgtgcctgggtgcacggcggcggcgccctgattggcgtgggccagccgagcgcccagcagttccagggtcgtttcttccagctggccgatgtgctgggtgtggacgaggagcgtcaccagacgctgtcggtggacaagtacttcccggccgtcacgccggagcacttcatcaccgccgacgtgcacctgggcgaaggtgtgctgcagggcttcctcgacgccggataccgcaagcccctgtcgggctgcggcggcggtcaggcgatcggcgagcttggcggcatcgacttcggcgagccgatcgcggacacgttcccggtcaacgaggacgtgacgctgctgcgcgccgacggcggtcaggtgcagctcgcggtcaacgagtacggcaagggccgcggcgtatacgtctccggtctgccctactcggccgcgaacgcccgtctgctggagcgtgccctgttctgggcctcccacaacgagggcaagtatgcggcatacagctcgtcgaaccccgagtgcgaggtcgcggtgttcgacaagtcgggttgctactgcgttgtcaacaacacggatcgcgcgcagtccacgtatgtggagcgcggcgacggtcgcatcgagcgcatcgaactggcgcccagcggtatcgcctggcgcaccatctgatccggtcgcatcatcgctccggatcggcgtgaacgagtgaatatcggggtcatcgtcgcctactccttcgacgatgaccccgatttttcatgccgcctgtccattgtgcgtacatgtacgcatcaccggatgggcggcataggtatatttattacacggtaagcgtgcacaagcgcgtcgcaacgcagacaataatcgcggatacccgcggggaatgaggagtcatgagcgagaagatggaagcggtcgccacgtcggaggcgcctgtggcgctgggcgcgtacagccaggcggtaaaggccaacgggttcgtgttcgtgtccggccagctgggcatcgaccccacgaccggcgaactggccggagacaccgccggtgagcagaccgcccaggcgctgaagaacatcaagcagattctcgacacggccggcaccggcatcgagcacgtcgtgcgcgcgacgatctacatgaagaacgtcgaagacttcaaggaagtcgatgcccgttacgccgacgtgttcatcggctccgtcaagcccgcccgcgttgccatcggcggcaacgacatccccaagggcgccctcgtcgagatcgacgccatcgcagttctgtgacggttcgcggggaatccgaacagtaacccgccttcaaccaaagccgtagcagtgagcctccaccagatgcatgatggaggctcactgctgtgagtcgtattgcataaccatgttgcgccgatgctgatggttccgtcggatgtggcgtatatgaaggtgatttgcgtccgtaagtgcgcgccgaaacgacgactgtgcgcacttacggacgcaaatcgggccttttgcgtccatatgttcgcgcacttgctgtttcggcgcgcacttacggacgctttgggagcgccccccaatctcgctccgctcgacagccccctgtcagcgggagtgcggccaacgctcccgctggcggggctgtcgcaaagcgactgaggtggttcacacgtgacacgctatatagagtcaccaaacgtgtctcccaaatcatctccggccaatccaccgcatatgtgatgcggtggtgaaggagtgacgcggatcaccctgattcttaccctcgaatgccccgaacacagctgcgcggcctatgatgacctgcaccaatggcgttggcgcgactatgtcgcgcggcgaaatatggaagcggggtgtgagatgcacgggcgcgaaggacgaggacggctgtccggatccgttgtggcggtggtttccgtactggcatgtatcgccatgcttgccggattggtgatgggcacgacgcatgtggtcggctgggtgttcgatgcgatcggactggcgtcgccacagcaccgcccgatcgtcatcgcgcatcgtggcgacacccggcatgctcccgagaactcgctggcttccattcgcgccgcaaagcagaacggcgccgatttcgccgaaatcgacgtgcggctgaccaaagacggcatacccgtggtgttccatgaccgcagaaccgggcgtctggacgcgggcggtcgcgacgtgctggtgaacagtatgccgttgtccgcattgcagcgcatgatcatgcagcaacgcggcatgcggtattcggttcccacgctgcgtcaggtgttggatgacgcttccatgtcacgtccggggcagcggcggttcggcttgctgctggacatcaagacggacgcgcggtatgcccggaaagtggccgatgccgtggtgcgtgtggtcgaggattccaaatacgccggcaatctgatggtgatgtcggccaacccgtatgcggtgatggtcttcaagagcatgcgtccgcagtggcatgtaggcctgtgcgccagcggcaggcccgatctgacgcaatgggatgatgacggcacgagcgaagcgcggttcatggacggggccgcgcgggtcgagaccgtacgccgcgaagtgacggcgaagcgcggcggaaagcagcgaaagcatcccatgttccgtggaatgcgcggcgaggccatggacttcgtcgtgttccgcgcgcgggacgtcacatcaagactgctgcggaatgcgcggctgcgcagaattcccgtatatgtcgactcggtggattcatacgatgccgcgaacggcctgctgcgccacggcgtcagcggactgctcggcgagaacatcacgccgttgcagcaggcttgttcgtcatatcacgggcttcccgaaccgttctcgtcgccggacgatgacgatcgctcccaggcgtgacgccggccgatcccgcgtcggtgcatgaaccggacgttcgctgtcaaagtgcccggtacactagggagaatgagtcctgaagcgcttagtgaactgattgaaaccattgcccacgatctggtcgccgccggaaaagccggtaccctgaccgacgatttgattcccgaaaccgccaaattcgccgtgatgcgcccgaaggatcgcgcgcacggcgattgggcctccaacgccgccatgcagctggccaagaaggccggcatgaagccgcgcgatttggccgagctgttcgccgagcggctgaccgccgccgacggcatctcgaccgtcgaggtggcggggcccggcttcatcaacattacgctggattccgcctccgccgccgcggtggtcgacaaggtgctggccgatggcgcaggctacggcaagaacgcgcacctcggcggcaagacgctcaacctggagttcgtctccgccaacccgaccggcccgattcacatcggcggcacccgttgggccgccgtcggcgactcgatggcccgcgtgctagaggccaacggcgccaaggttgtgcgcgaatactacttcaacgatcacggcgagcagatcaaccgtttcgcaaagtccctggtcgcagccgcgcacggcgaggagacgcccattgacggatacaagggcaagtacatcaacgagatcgcggaccgcgtgatcgccgaggcggaggccgatggcgtggatgtgctgagcctgccgcgcgtcgacggcggcctcgacaaggacggcaacccgctcggcgagggcgattccgagcagcgcgaggagttccgcaagcgtgccgtgccgatgatgttcgacgagattcagcgctcgatgaaggaattccgagtccgcttcgacgtgtggttccacgagaacaacctatacaaggacggagaagtcgaccgcgcgattgaggagctgcgcagtcgcggcgacatcttcgagaaggatggagccacctggtttgaatccaccaagcatggcgatgacaaggaccgcgtcatcatcaagtcgaacggtgacttcgcctacttcgctgccgacatcgcctactactggaacaagcgtcaccgcgctgtggatccggccgacgtggcgatttacatgctcggcgccgaccatcatggctatatcggtcgtatgatggccatgtgcgccgccttcggcgacgagccgggcgtgaacatgcagattctcatcggccagctggtcaatgtgatgaagaacggcaagcccgtgcgcatgtctaagcgcgctggcaacgtcgtcaccatcgacgatctggttgaggccgttggcgtggatgcggcccgttactcgctggcccgtaccgactacaacacgtcggtggatatcgatctggatctgctgacttcgcattccaatgagaacccggtgtactacgtgcagtatgcgcacgcgcgttcctgcaatgtggaccgcaacgcggccgctgcgggcatcggtaccgaaggcgctgacctgagcctgcttgacaccgaggcggacggcgaggtgctcgccgcgctcgcccagtggccggcgactttggctctggccggcgaccagcgtgccccgcacaaggtggcgcactatctggaggacctggccggtgcctaccacaagtggtacaacgtcgagcgcgtggttccgatggcgctgaccgaccccgaggagcgtctggatgacgccgctcgcgaggcactgcgcatcgccaagaaccccgaaccggcacgtgccgccgcacgcctcaagctcaacgacgccgtgcgcacggtcatcgcctccggtctcgacctgctcggcgtcaccgcccccgacaagatgtgacctaggctgcccctggtcgcgcgtagcgcgactgggggcggttctcattcaggtactctccgaccgagcctccgccttatggtcgggaagtggtatcacggtgccggttctggcacaatggcacagtaataggaaaagcggcaagccctgagcgaaagaggagcaatgactggatctgctgtgcgtgtggacggaacgcaaggtatcacccccatctggccggtggcgacggcagtgaatgccgaaggcgccctgacattccacgggcgcaccgccgagtcgctgcttgacgagttcggatccccgctgtatctgatcgacactgacgaagtttccgcccgcgccagatatttcgtgcgcgcggcggccgacgccttcaccaactccaccacgcacgtgagtttcgccggtaaggcattcctctccaaagaagtcgtgcggttggtgaccgatgcaggcatgctcgtcgacacatgctcgatgggggagatgcgcatcgcgctcgccgcaggcgtccccggccgtcgtctggtgctgcacggcaacaacaagtccgacgcggaaatcgaactcgccatcgagcagggctttgcgaaaatcgtcgtggacgagccggatgagccgtcccgcatcgccgccatcgcgcgacgactcggcaagcgtgcccgcgtgatgctgcgcgtgaccgccggcattcacgccggtggccacgaatacatctccaccgcgcatgaggatcagaagttcggcgtgccgctgctgccggccggcgccgatgccgcggcactcagcgtactggacgaactcacggctgatccagcaggcgtgacgccggctgctacgaacgcgcacatcgccgaacgcgatggtgatgccggtgacgggaacgcgaagcccgagcgcgaactgcactacgacatgaagtacccgtacgacctgagccacgaggagatccccgaaaaggacaaggcgctcgccgccgcgatggcaaccgtggcggatgggccggcactggccgtgctcaaggacatcctcacacggtccgacgagttggaactcgtcggcattcactctcatatcggttccaacatccatgacgcagacgccttcatccaggccgccaagcgcatgatgctgctgcgcaagaccttctacgccaccgacgcctatacgctgcccgaggtcgacttgggcggcggctactccgtggcatataccgacggcgaggattcgatggacgtgcgcgtcgagctgcgtcgtctcgccgaagcggtcggtgccatcaaccgtgcgctcggtgtgcccgcgccggccatcagcttcgagccaggacgatggatcgtcgccccggccggcgtgaccctgtatcgtgtgggcacgatcaagccggtgcatctgtccgacgccaaagacaagaccggcaatcccatcgatgagcgcgtgtacgtgtcggtggacggcggcatgagcgacaatattcgtccagcgctgtacggcgccgactacacggtccggctgaccaaccgtcgcgggtcggacgagtcgatgctggtgcgcgtagtcggcatgcattgcgagtccggcgacatcatcgtgcacgaggacaggcttccggccgacctcaggcgcggcgacatcctcgccgtgccggtgacgggcgcatacggccgcacgatggcgagcaactacaatcaggcgctgattcctgccgtggtcgccgtgagtgaagccggcgcacatgtgatgatccgtcgccagaccattgacgacctgctggatctggatcagagctgaccgttcagcgccagcggcaagatataaaagcaaaaagcagtagaactcaaaaaaaggagtcctccccggctatcagggaggactccttattgtttgttgtggttgtgtctaccgaatcacttggtgacgatggtgccaatcggagcgccggtagccaccgcacccttggcggtgatcgacagcttatcgatcttggccgggttggtgaacacgacgatcacgtcggtgggctttccagcggacttgaccacattccagtccacgtcgaccagcgcgtctccggcgttcacctgctggccttcgctgaccatcatcgtgaacggggatccggcgagctgtacagtatccacgccgatgtgcacgagcacttccactccggcgggagtggtgatgcccactgcatgcttggcctgggcgaccgtggtaatcttgccggccaccggggcgaccacacgacccgacgtgggaaccacggcgaatccgtcgccaaggatcttggcggcgaaggtctcgtcgggcacttccgtgatcggcttgatggcaccgtccacaggggcgagcaccgcgttgtcagcggctttcaccttgggggcgggggcagcggcagcgggggctgccgtcacgcttttggggaaccaccaccgatgacgggcttgccgtacagggcggacagagcgtcagccacggcctgcacctgcgtgccgacgatgatctggacgttcttcttgtcgatcaccttgacaccggggacgccggtcttgcggatggcgtcgacgtcgaccttcgaggaatccacgacacccatgcgcagacgggtgatgcagttctcgatttcggtgatgttgtcgtgaccgcccagagcggcgtacagcttgccggcgaggtcggcgtacttgtcaccggtggacgaggtcgcggtgtcgaacgctgcggaggaggcatcgtcgttatcgtcatcgccacggcccggggtcttcatgttgaacttcttgatcatgaagtcgaacacgaagtagtagatgaccgcgaagacgaggccctgaacgataagcatccacggcatatgagctgcgggaaccttcagcgacaggaaccagtcgatgaagcctgcggagaagttgaagcctgcgatccactggaacgaagcggcgatgaacaccgagatggcggtgagcagcgcgtgcaccacgtacagcgggaaggcggcgaacatgaaggagaactccagcggctcggtgacaccggtgaggaacgcggcgagcgcaccggcgagcatcagggatccggtggccttcttgttctcgggcttggcgttcttgtagatcgcgagtgcaccggccggcaggccgaacatcatgatcgggaagaagccggcctggtagatgccggtgacgtacacgccgaacgggtggaagccgccggtggcgatgaccgcgccactggccgggtcggcgctgccccagaacttgccgatgtcattgatgtcggcaaggttgaaccagaacacgttgttcagtgcgtggtgcagaccggtcgggataagcagacggttgaagaaggcgtaaatgccggcaccgacggcgccgaggcccatgatggactcgccgaaccagaccagcgcaccgtagacggccggccagatgaacagcaacagcagcgagatgatggacatgaccgcagcggtcagaatcggcacgcaacggcggccggagaagaacgccaggaagtccggcagttttgtcttgccgaacttgttgtatagcgcacctgccacgcagccgaccaggatgccgaagaacacgttcttgttgccgatggcgccagcggcgaatgccgggtgctcggtgtcgaccttggtggcgtcgaagccaaggaacatggacgcggagcccatgatcgtggtgacggtcaggaaaccgaccagtgcggacagtgccgaggcgccgtccttgtcgcgagccatgccgatggcgacaccaacggcgaacagcaggcccagattgtcgaggatcgcgccgccggtcttgcacaggtaggcagcgacgacgttactgccaccccaaccgctcgggtcgatccaataaccgatgcccaggaagagtgctgcagcaggcagacacgcaacgggcagcataagagcgcgaccaaggcgctggatatatgctttcattccaacctccctctgaggatacggacggcgctttcttccgccaaaattcccgttcacgtaccatcccaccattggatcggacgctcgcgagtatgtcagcaacgccgcttcaatgaacaatggtacgtgacttttacgatatgaggcccgtgtttcgttaagattatttgctaaataggcaggaaacatggcgggtgtataagggctcagccttacgggaagctggtgtttcacgatttctctgtttaaggcgttaatttgtaaatctactttactgcggcgtgtcgttagcgctgctacatagtggaaagccaagggaaacgaggccattgggagctggatccggcctccggggcgttgacgggcggcgtgtcggattcattccgtaggatggtacacagtgacgccggcccggcgaccctctatcggtgagtggcggccgggcgcgccaaacaccgctgaaggaaggaaatccgtggcacagctgaatgacaaccccatccgcgttggactgttgggagcgggaaccgtcggatcacagaccgcacgtctgctggtggagcagaaggacgaactcgctgcccgcatcgggcgtccgatcgagctggtcggcgtggcctgcctggatcccgatgaggtggacttcccctggatcgacaagtctctgctgacgaccgacacgatgaaggtcgccaccaacgccgacatcgtcgtcgagctgatcggcggcaccacagtggcccgcacgttcgtgatggccgcgatcgagtcgggagcctccgtggtcaccgccaacaaggcgctgcttgccaagtgcggcccggaaatctacaccgcggccgaggccaagggcgtcgacatctacttcgaagcggccgttggtggcgccatcccgttcctgctgccgttgcgcgaatccctggcgggcgacaaggtgaccagcatgctgggcatcgtcaacggcaccaccaactacattctcgacgagatgaccaccaagggcctgcagttcgatgacgtgctcaaggacgcccaggccaagggatacgccgaagccgatccgaccggcgacatcgaaggctacgatgcggccaacaaggccgcgattatggccacgctcggcttccacaccaacgtgacgatcgatgacgtgagcgtcgagggcatcacgaagatcaccgccgacgacatcgccgcggccgccgccgagcacaaggtcatcaagctgctcgccgtcgtggagaacggcgaggccggtgtgtcggcgcgcgtctacccggcgctgattcccgaatcgcacccgctggcatccgtgcacggctcattcaacgccgtgttcgtcaaggccgaggcggccgacgacctcatgttctacggccgcggtgcgggcggcgctccgaccgcttccgccgtcgtcggcgacgtggtcaccgaagcccgccacatcgctcaaggctgcaccggcccgtccatccccatgtaccacgagctgcccaaggcgccgatcagcgccagccgcgccgcgttcgccgtgcggttcctcatccacgacaagccgggcgtgctcgccgccatcgccaaggagttcgccgaccacggcgtgtcgatcaacggcgtcaatcaggatctcaagccgacgatgaccgatcctggttatgacggcgagatccagcagctgcgcatcgtcacgcatctgaccgacgaggtcacgctgcgtgagactgtcgaagccgtccgcacgctggacttcgtcaccggagagccgtccatcctgcgcgtgctcgactagtcatacggttgcctgcccccgctgtcgggggctgtcggcaaagccgactgggggtggtttcgcggcgtttccgcgaaaccaccccgatctcactatcgtttgctcccctccccatcagcggggacggaatcgctgaatcaaggaatcatggaaccaatctgtacacaggtcaaggtccgcgtgccggctacaagcgccaatctgggctccggcttcgacacggtcggcctcgccctcgattatcatgacgaactcaccttcacgctcagccgtgacccgtccaatcgcgccgcgcaagtgctgatctatggcgagggcgaggacacgctgccgcgtgacgagacccatctggtcgtctccacgttccgcaaggcatgccagaccttcggcctgggcaaggtcgggttcatcctcgaagcgcacaacaacatcccgcaggcgcgcggcatggggtcgtccgccgaagccatcgtggcgggcatcgccgccgctgccgcgttcgcgcaggaggaccggctcaaccgcgattccatcttcgagctggcggccgccatcgaaggccatcccgacaacgtggcgccggcggtgtacggcggcatgaccgtctcatggaacttcgacacggccgaaggggtcggctcggtgccgatccccggtggagacccgctgcacggcggtttccacacggtcaagtacacggtcgatccgggcgtcacggcggccgtgttcgtgcccgactacgaactgtccaccgagaaggcgcgcgaggcgctgcccggcgaggtcgcctatcgcgacgcggtgtttaacgtgtcgcgcgtggcgctgatggccgcggcgatgaacccgcgcgcgctcgcgtccggcgaagagccgaacgcgctgctgtacgctgccacgcaggatcgcctgcaccagccgtatcgcaaggggctcatgcagccgtcatgggacctgattcaggcgttccgttcccgtggtttcgccgccatggtgtccggcgccggcccgtgcgtgctggtgctgcatcacggcgacgccgtggcggacatcgatgaggtcgcggcggaacagctggcttccggccattggaaggtgctgcacctgcccatcgacacggtcggcgtgcaggtcgagcgtaagtaggaataccgcacgtgcctcctcgcccgctcctcgggccggagatgaggggagcgcgaagttgccggttgggtggtgcggcagctggtgcggcggcaaaagaaaggtgacgatcatgtccattccgatgattctggcgtcgaagtcccagccgcgccgggatgtgctgtatgcggccggcatctgcccgaccatccgcgtgtcccatgtcgatgagccggctgcgctggaaaaagccgccaccgagcgcggcgtcaccgttgaccagctgaacgtcgaacagcgcgtgatgattttggccgaggccaaagcgcaggccgtgcatcaggcgtaccgcgatgtcgccgacgcggccgcgagcgcgacgggcgagcgcgtgatcgcgtacccgttgcaggccgcggagcttcgcggcgagatgaacgtcgcggacatacctcgccagagtggcgctccgcttgactattcgaaggcgccgatcgcgatgacccgtgacttctccggcgtggacatgccgaccgtcaccgagccgatatccaatgtgattgccatgcagccggggctcactcgggcgagcagcggcccgctgatcgtcggctgtgattcgatgttcctgcttgacggcgaatgctacggcaaaccgcacagcgtcgaggtggcgcgtgagcgactgcgccgcatgagcggcgccaccggcgagctgtggaccgggcactgcgtgatcgacttcgcgtccgggcgcgtcgagcgcggcgcgagtcatgccgtcgtgcggttcggcgagttcagcgaccgcgacatcgaacgatacatcgccaccggcgagccgctggaagtcgcgggatcgtttacgctggaaggttttggcggcgcgttcatcgatggcatcgacggcgacccgcacggcatcatcggcatcagtctgccgctgcttcgccgactcgtcggcaagctcggcgtggactggaccgacctgtggaacgtggcccgcggggaatcggcgcccgaagacaagaccggaggcggcggagtcgtgccgcccaaggagaacgtgcatcagcccggcgacggctggatcgactgcgcatgcgggcgcaagcactggggattgaacggtgcctccggcgtgctgctcgcgcggcgtgaccccaagagcggcgaagtgaccagcgtggtgatgcagcatcgcgccgcgtggagcgcggaaggcggcacatggggcattcccggcggcgcgacggccgacggtgaaagcccgatcgagggtgcgctgcgcgagagctacgaggaggcgaacatcacgcccgaagacatcgaggtggtcgggtcctaccgtgaggatcacgggccatgggcgtacaccacggtcttcgcgttcgagaagcccggtcaccgggtcgtgccgcgggcgaacgatgacgagagcatggaaatcgaatgggtgccgatcgacgaagtgcccgaccgcaagctcttgaccgcgatgcgcacagactggccgcgcttcgccgagcgcctgcacgcgctggccgctgccgcacggtgttcgtgacggttactgcagttgcgccaaacgctggtagatgtcggatggaaggtggcggtttgcgaatcctttgacgcgaattcccgtgtcgaggggcatatacacgatgcgcatgccggcgcgcgactgttggcctcgtcgatgttggaagtggaaggaacgccacccgctgaaaccgtacttgagagggcttccttccacgttgccctccacgagctgtgtcagggctcggtgaactctggccaccgccatcttgaattcgccttcgtcgggccagacatatgccagaagaatcacatcatccgcaagtgcatccggatccatatacagaccgcggacggacgagatgatggcaatggcttgctccaataatgcgtagtcggcggccatcagcgaccgccatcaaggaacgcgtgaatcttctccttgcgccgcttcagactttcctgcgccgactgtgacagttcggagccggtctcccattgttccttatcgcctcgggcggtgaacatctgctgtatggtgaggcgttcgacctcggattccagcgcattgatgacatccagcatctcgttgagagagtccacggacaccagatagccggctgtgtcggcgcggtagacgatttccagcaatccccgctgctccagcgcctttcgccatgcgttcgaacgggacaactcggtcaacccgatgcgagagcccggcgtggagatctctcgtaacgcctccgcacgttccttgatgtccatgtaagtcaccaccttaatcacaacaaaatatgcattatattacgcatagtactacatgatataatgcaatatatattcacgactgccgagccgtaccgcagacgagcgactgggggccttagtctcgcttcgcgacagaccttcgggccctgcaatcacggacgccctgtgggcgctcagggtagtgccaccactctcttcccctaatccttccggatgaggggagaaccggttcgccgcaaggctcataccgccgcccgatggccggtcgcgtgccgcctgcgtaatctcggaggcatgaacacagcaacatcacaatctcagtcccgcgcccggtctcagtcgtggacaccggtgatcgaggcccgtgacctggtcatggactacaccgcaggcatggcccgtgtgcaggcggaccacagtgtcaccggcgtgatgccgcgaggcgccggaaccggcggcccccatccgtatgcggccggcggaaccggctacgccatgcccgccgtgcatacgctagcgctcaatcacgtgaacttcgacttggctcccggcgagacggtcgccgtgatgggaccgtccggttccggcaagtcgacgctgctgcacgcgctcgccggcatcatccgcccgacgtcgggcacggtgaccttccaaggcgcgaatctgaccgcgatgagcgacgcggaccggaccaaactgcgccgcggtgcgttcggtttcgtgttccaatccggacagctgttgcccgagttgccggcggtggagaacatcgcgttgccgatgatgctggacggctccgactaccgttccgccaccgatgcggcgatgctgtggctggaacggctgggtttgcggcagctggcctcgcagcggcccggcgagatgagtggcgggcagatgcagcgcatcgctatcgcccgcgcgcttgccgtacagccggcggtcgtcttcgccgacgagccgaccggcgcgctcgaccaggccaccggccgcgaggtcatgagcattctcatggaagccgcgcgtgataatggcgctgccgtggtgatcgtcactcatgatcccaacgtcgccggcttctgcggccgcacgatgacgatgcaggacggccgcctcagccagacggccgaagccggccttgcccccgctggcggggttcggcatccgcaggctgactgggggcggcccgagagcgctgaaccaccctcagtctcgctgcacccggcagttcccgcaggaggcgcccaatgagcacgttcgcactatggcggctgttccaccgcccaggccggcgcggcggttccggccacacatcggcgttggccatcgtcgcgttcgcggcggcgacggccatcttcctgaccgtgctgggcggcgtgcacgggttcatctggcgcgcgtccgccgaccatacgctgaaatgcctgattgacaggtcgacctgcgcgccgggcacatgggcggtgtgggccggacggctcaaggaccagcacgactgggcgcaatacgccagcacgtacgtgatgctggcggccttcgcctgcatactgctgatcgtgccgttcgtggcgctcgccggctcggcggcgcgattggcggcatcgcggcgggacgcgcgattggcggcactgcgcctcgcgggcgccaccaccagtcaggtgaccagactgaccgcgttggatgccgccggacaggcgctcatcggcgcgttgatcggcatcgtcggctatttcgcgatcatgccgctgatcatgctgctgaatttccaggatcagaggttcacgttcgagcagttgtgggtaggatccctgtcgctgatcgtcgtgctggtggtggtcacggtcctggcgctgatctccgcattgctgacgctgcgtcgggtcgccatcaccccgctgggcgtcaccgctcggaccgcccagccgctgcccacgaagtggcgcgtaatcgtgttcctggtcgtgctggtggccgcgatcgtgctgttcaagaacccgcagggcctgctgcattacggtgaggtgacgatgtatgcggtgattatcgggttcatcgcgctgtgcttcgctctagtgaacctgatcggctcatgggtggtgaccgcacgggcgaggttgcggtcccgccgccctaaggacgccgccacgatgatcgcgatgcggcgcatcctcgacaatcccaagcgggcatggcgcaatgtgtcgggcatcgcgctggcggtgttcatcgctggcatcacctcgatctgcgggttcatcggcgcatcgtcgaccgcgcctgtcgaaggcgtacccgaaccgggactggccttcatccgcgacatcggcaccggagggttgctgacgctcggattcgcggccgtgctggcggccgtcagctccggagtgatgcaagcgggcagcgtctacgaccaggtttccgaataccgcatgctggtgttggaggggacggacgtgaaaacgttgaaccgtgcgcgtttcatcgaggtgctgaccccgctcaacacggtggtggccgttgccggcggctgctcgatgctgctgatgttcccgctgttcgccgcatccatgaccaaacccgccacgctgctcagcttcttcggcggcatagcgttgtgttacgcgctggtctccgtcggcgcattcgcctcgaaccgtgtcgccgccagcctgaatctcaccgactggcgtgccgacgactgatcgcacgctctcaaaactcgcagatagggggccttttaacgaaaaaggccccctatctgcgagttttgagagcgtcaactcagcagagcggcgataaccgcgatgaatatggggctcgtcatcgtgctcatcaggatgccgtcgcgtgcgaacgtaagtccaacgttgtaccgggcggcgtaattgtagacgttctggccggtcggcagcgccgccagcaccacgcaggcgtacagcgtcgcgccgcggaatcccatgacgaaataggagagcaggaaggcgatgatcggcatcacgatgttcttcagtacggctacggtgaagatcgccgggcggtcgcccttctgctgcagcggcttggtgccgtgcagcgacatgccgaacgccatcaggatcatcggaaccgcggagtccccgatcatgtcaatcgggtcgaagatgaagttcggcacggggaaccagccgatcttcgcattgatcgccgaaaccaggatgccgcccagggagccgatcagcagcggctgatgcagcggctgcttcaggatttccttgaccgataccttgcccttggtggtcacgtcgagcaccgtcaggccgaccggcgtgaagatcgcctgctgcatgaccaggatcggtgccaccagggctccgttgccgaggatgtacgtggctatgggcaggccgatgttgttcgagttcagatacagtgagttcagcgcgccgacggtcgcgtctgccggccccaagtggaagaacagcttgttcagcatcaggaacagcgcgccgacgagtacagcggagaagaacgccacgatgatcgacgaatggaagatctcgaagatcggctctttcgacagaattgcgaacatcagacacgggctggacacgaagaagctgaaacggttgagcaccatctgggcgctcggcccacctatgcgcattcgagcggccacatatccgactccgattacgatgccgatgacgcagaagccttccatcgcgtttaatagacccggcatattcccatcccttttccgtttgctggcaaaccccatactgccatacgcatgtgtttcgcgaggttctgtctcataacgtaggcgaaacccgtctcgcgagccacggtagcacggcatgctgcgcgtcgcgcgcttgttctcgccgccgacggggagttcgaccgtctcattccggcccggcaacgggctccgacgggacgtgctgccgttaggatggtcagcatgactacgacaacgacgatggcagcggccggcgctgacccgcgctcggcgatcgcgccgatcacctgcgacacgaccggcacgcgcgagaaggcgctcgcctcactgctcgaacagatcatggactcgtattccgtcagcgatgacgagaagccgctggccgacgccgtggaggcgttcctgcggtcgaagccgcacctgacggtgcacaggcacggcgacacggtggtcgcgtccacgtcgctcggcaggcctcggcgcgtggtgctcgccgggcaccttgacacggttccggtgatcgacaacttcccgccgcgctggctgacgcccggcgacccgctgatccgggaggacgtcgccgcggcgcaccccggcgagcgggtgatgcggggccgcggcgcgaccgacatgaaggcatccgacgcggtgttcctgtacctcgccgccacgctggtcgacccgcaatatgacctgacgtacgtgttctacgaccatgaggaggttgcggccgagaagaacggtctgcggaaggtggccgaggcgcatcccgattggctcgccggcgatttcgcgatcatcggcgagccgactgactgcggcatcgagggcggctgcaacggcactatgcggttcgacgtggtcacgcacggggtcgcggcgcattcggccagggcatggatgggggagaacgccattcacaaggccgccgatgtcctgaaccgcctgaactcctacgagccgcgaaccatcacggtggatgggctggattatcgcgaggggctgaacgcgacgctgatttccggcggcaaggggacgaatgtcatccccgacgaatgccgtgtccatgtgaactaccggttcgcgcccgacaagacgctgccgcaggcgaagacactgatgatgggcgcggatgccggcgcggagctcggcaatggcgagcatgtcgccaccggtggcgtgttcgagggcttcggcatcgagatgaaggacgagtcgccgtccgcccggccgggcatggacgcgccgatggtggtgtcgttggcgaagctggtgcgtgagcgtacgggacgggaaccgctggcgaagctcgggtggaccgatgtcgcgcggttctcgctgctgggtgtgcccgcggtgaacctgggcgcggggagcccgctgcttgcgcacaagcatgacgagcagatcgccgaaagcgagttggcgaccatggccggcatcctggaggactggctcaccggccgcgcgtgagcggggttcgggcgcggatgtcggcatccgtgccatcgaatagtgtgcggacggctgcccgcacaacgctgtcagttggcgctgcaggttttgtcgacgatgtcgtcgccgtccgcatcggtgacgatgatacggatcctgacaccgttcgcggagcgaaagcgtctgcgtacaagcatgggctgagcgttgtcgccacgccaaaagaacgttgaatatggtgagatggtcatggccggtcaaattgtgtgccatacttaaagatggtggttctgcaaaccacctgagcgtgaaaggcgtcgatcccctcgcatgcatgaagatgcgcgagcgctggtgtccgccgaagcacgcacacggacttttaacggatttgcttcctgcgggcgcaagcgtagcgcggccacggtgagagcgtggtgtgagaccgcatgaggccatgagtgtgcgacgtggtgcagcacgtcgtgaggagtatcgtgcctagtgtgaacgataacggtttcagtcgtgacgaaaccgaagaacagcagcctacccacgccgatgcggcccagtcgcctgattcggccgataaaacgcctgcggcgccgcgtcgtcgtcgcggtggccgccgcgtggttcgtggcgccggtgccgccggtgccgcggtcgcgctgaaggtcgaggaccattccgctccgctgttcgcggaacccgtggtggagcagccccttccccgtcgtcgccgctcgaaggcggccgacgaatcgccggaggccaacgagccggagaccgccgcatcggccgattccgaaaagaaggatgatgcgcggcacgccaaggccgacggcaagtctcggtccgcgtcgcgctcctcgaaagcgacgaagcgccatgacgatgacgccgatcaggccgaaccccggcgcacccgcgtgcgtcgtcgcaccgccatgttctcctcgcgcgaggacgcttcgccggccgttccgggcgagccgtcggatgacgacctcggcgtcgataccggcaccgatatcatcgtccgcgatgattccgccgatctgtcccgcgccctggatgtcgttagcacgctgccgcaacctgcgccgcgcgctcacgcgatgacgtccgtgctgttccaggagccggtgctgcccgtgccgggaatcgtgcgcgacgcgcgcgatgacgaccgcgaggatgacgaccgcgacagccgcggtggtggcaagtcccgtcgctcgcgcaatggtcgtgtgtcacgtgacggtgcgcagggggacaaggacaagagcgcttcctcccgtcgcgatatcgacggtctgagccacatcgagcgcgtcgacagcttcgataccgacgacagccgcagccgtgacgaatccggcgaggccgacgagccggtgcgttcgtcgcgccgcaaccgtcgcctgaacgcgcaggagcgccgtgcggccgccgaagtggagcagatcgaggaggacctggagctcgacggcatctcctatacgccggtcgacgacgaggagccctccgaggattcgggcacgagatcccgtcgccgtcgtcgctcccgtcagaaccgtgccgacgacagccgcggcaacggcgagtcggacagcagccagtccgcggcgcagcaggacgagccggccaagccgtcgtcccgccgcacacgcgacgaggaagaagacgatgactccaacgtcacccgtcgccgtcgccgtcgccgctcccgcgcgtccgacgagcagggtgacgatgagatgaccgtgcgccgctcgcgcaagcagcagtacatcgacgagatcaccgacgtcgagggctccacccgactggaggcgaagaagcagcgccgccgcgacaaccgccgcgagcgcagccgtcagagccagctggtcgagcaggacttcctcgcgcgccgcgagcacgtgaaccgtctcatggtggtgcgcgaacgcggccatcacacgcagatctccgtcatcgaggacaacgtgctcgtcgagcattacgtctccgacatccaggaggtcgccacggtcggcaacatctacctcggccgcgtgcagaacgtgctgccgagcatggaggcggcgttcgtcgacatcggccagtcccgcaacggcgtgctgtatgccggtgaggtgaactgggacgcgacccgcctcgaagggcagccgcgccgcatcgagctggcgttcaaatctggcgacccggtgctcgtgcaggtcaccaaggatccgatcggccacaagggcgctcgcctgacttcgcaggtcacgctcgccgggcgtttcctggtgctcgtgccgtccggcggcatgaccggcgtgagccgcaagctgagcgagcgcgagcgttcgcgcctcaagggcattgtctcgaagatcgcgccgaaggacatgggcgtgattatccgcaccgcggccgaaggtgccaaggaggaggcgatcgtcaaggatctggagagcctggtccgccagtgggagcgcatcaacgccaagcgcgaggagttctggcacggcaagcggccgaagctgctgcagggcgagccggacgtcgcgatccgcgtggtgcgcgacatcttcaacgacaatttcggcgagctaatcgtcgagggcgacaaggtgtacgagcgcatcgaggaatacctcgacacgatggcgcccgatctcaaggagaagttgtccaagtgggatccgtccgagcatcagggcaaggacgtgttcgacaagtggcagatcgacgcgcagctcaggaagggcatggagcgtcaggtgtacctgccttccggtgggtcgatcgtcatcgaccgcaccgaggccatgaccacgatcgacgtgaacaccggccggttcatcggccgcggcaagagccttgaggagacggtgacgcgatgcaacctggaggcggccgaggagatcgcgcgccagctgcgtctgcgcgatatcggcggcatggtcatgatcgatttcgtcgacatggtgatgcccgccaaccgcgatctggtgctgcggcgtctggtcgaatgcctggcgcgtgaccgcaccaagcatcaggtggcggaggtcacgtcgctgggtctggtgcagatgacgcgcaagcgcatcggccagggcctggtcgaagcgttctccgaggagtgcccgacctgccatggccgcgggttcatcttgcatgacgagccgaccgtcagcgcggattacgatgatccgtatgcgctcaagggtggcgatccgttcatcaagaccaacaagcacggccgcggtacggatgtgcaggtgccgcagggctcctcgccggatatcaaggccaagctcgcgcagatcgccgccgcggcggtcgccgcgaacggcaccgacgaggatgagtgacccgacgcgctgaatgaatcatgatttccggtgtgtcaacctgacacgccggaaatatgatttgcgttagtacatgggtcagtgtagattagattgctggtgtctgaccagcggcttgcgtgcgtcaggcaagtagcttttataacaccatagcaaggaacgaagcatgtacgcgattgtgaaggccggtggccatcaggaaaaggtcgaggtcggtgacgtgattctcgtcaaccgtcttgaggcgaagaaaggcgagaccgttgaattcccggtcgcgctggttgtggatggtgccaaggtgacgctgggcgccaaggatctcgccgcggtgtccgccaagggtgaagtcattgacgacgaggccaagggccccaagatcaacatcatgaagtacaagaacaagaccggcgtgactcgtcgcaagggtcaccgtcagaagctgaccgccgtgaagatcacggcgatcgcctgagccaatacaggaaggatctgaatcatggcacataagaagggtgcttccagctcgcgcaacggtcgcgattcgaagcctcagtacctcggcgtcaagaagttcggcggcgaagccgtcgtcgccggcaacatcatcattcgtcagcgtggcaccaacttccaccctggccagaacgtcggcatgggcaaggatcacaccctgttcgcgctgaccgacggcagcgtgaagttcggcgtccgtcacgaccgcaaggtcgtcgatgtcatcgccgcctgagcgataccgcattaagtgtcaagccgcatcccacccgggtgcggctttttcgtttgccgccctagcattcccggcatgtccgcaccgcacgacgcatccccacagagccgtcacgcctgtgccatgcgatgtcacgcctccctcatcaggcaccacatcactctccgaggagccaccccaacctcctctggtacaccggtacattacgggttgaaatagccgattccggcaattccccgtgtgaaatcgccgttttcaggcctcaaaacgaccatttggcacgggtaattccggataacggctatttcaacccgtgttttggcgcatggcggcgcttatcggggcttggaatggtgtcgctgcgatcacggtcggcctttccgggcttatgcctgctggcccacatgtgtgggttacgagtgcggcgcgcggcccgacatcacgcgtgtcatggttgtatgcccatatctctgagctgccggacgattcgtcccggattgtcaagatccctgtagtacatgcgcaccatgccgatcgcatactgcgacatgcattgctggcgtttccgttcctcatccactacttcgcgaatttcccggcctgaagtcatatgcggatccacatacttgcgaacgccatcgaattccccgacgattaccgagccgtcttcacgcttccagagaaaatcactgcgatgcttacgaccgggatgatcgagacaggggaattccacctgaatatcgtcaggagggcagccggcatcatgcaacatgccgcgggcctcggattcgccgccgttctcggcacgccgatctgcaagcgcgaacgcgcgctcgacggcggcgcggttgcgtgagtatttcacgctggagggatacgcccggagcacggattcgctcacgaggccgttgcggagcgcacaatccgccggcccgagggcgtagcgcagaggctggcatgccgcgaggtcgaacagtgtttgcagcaagctgatgaccttcactccctgaaccacggtgatgtccggatgcgtgatcgcgtgatgcgatatgtgcctggtgtcctgatgatgcgcgccggggctcgcgacgatgcagattgggaatgccagccgataggagcagtcgagcccgtgcatgatggcggccgtaggaccgcagaacacccaatcaggatgttggatggcgagcgctcgtacgatatggcgaacctgttcatgcggatcaagcgattcccaatacgtgggctctgcgtacaggccgcggaagactctcagcacggcgccggtcttcactctcctgcgtattgcctgtatgtccgtgttggtggagggaatggcgcagcgtcgctcctgccgtgcaacggcgaaaagtctgtccagcgaatgatgcgtccccatatgccaagtgtagggggtctgggctcgcgacatctgcgaattcgcgatgagcctattccgacgggaaatccggatgatggcggagcatacggtggtgtgcaaggcatccattcgattgcgcataggcggcgacggcccacattcgcgcgtcatgtgttgtgccctctcatcatgtatcgtgtttcccgcgtcatgtgttgtaacccccgtgcgtcccctccggtaccgtgcctccctcatcaggcaccacatcactctccgaggagccaccccaccctcctctggtacaccggtacattacggggtgaaatagccgttatccggaattccccgtgccaaatggtcgttttggggcctgaaaacggcgatttcacacggggaattgccggaatcggctatttcaacccgtaatttgagcacttgtgaagacctccgcacggattgggggggggcagagcgaccggggctgctccgctgcgggcggagtgagagaacctggggagaaccgggggtcaaggtaaggtagagcgttatgagtgattttgtggatagagtgaccgttcatgtcaagggcggcgacggcggcaatggatccgccggcatcaggcgcgagaagtacaagccgttggcaggcccgaacggcggcaacggcggcaacggtggttccgtggtgttcgtggccgacacgaacgccaccagcctgctggactaccggttcatgccgcatcgcaacgccggcgacggcacgatgggtctgggcgacgtcaaggacggctccaagggcgccgacctgatcctgccggtgccgctcggcactgtgatcttcgccgcggtcggcgctcaaggccgtcccaagcgtccgggcgagcagctggctgatctgcgccataacggcgacaagttcgtcgcggctgcgggcggcgcgggcggtctgggcaacgcggcgctggccaacaagacccgccgcgctccgggtttcgctctgctgggcgaaccgggcgaggaacgtgacgtgatcctggagctcaaatccatcgccgatgtagcgctagtgggcttcccgtcggccggcaagtcgagcctgatcgccgcgatgagcgccgccaagccgaagatcgccgactacccgttcaccacgctggtgcctaacctgggtgtcgtcgtcgcaggcgaccaccgctataccatcgccgacgtgcccggcctgattcccggcgcatcgcagggcaagggtctgggactggagttcctgcgccacatcgagcgcacggagatcatcgcccacgtcatcgactgcgcgacgctggagcctggccgcgacccggtttccgactaccatgcgctggagcatgagctcgccgaatacgccgacaagctggaactgccgctgggcgccatcccgattccggaacgcccgcgcatcatcgtgctcaacaaggtggatgtgccggaggccaaggagctcgccgatttcgtgcgcccggacttcgaacgtatgggattgaaggtgttcgagatctccacggcttctcatgaggggctgaaggagctgaactttgcgctggcggccatggtcgccgacatgcggcaggaggtcgccagccgcgagcaggccgaggaggaggcgcgcgtcgtcatcaatccgttggagaaccggtcgaatcgtcgccgtgcggctgcgaacggcactgccgatttcgccgtggcccgcaaggagggcgatggcggtttctggtacgaggtgaccggcgtgaagcccgaacgttgggtggtgcagaccaatttcgacaatgacgaggccgtcggctatctggccgaccgactcgccaaacttggcgtcgaggacgagctgcgccggctgggagcgaagccgggtgacgaggtgcgtatcggcaaggggcagcgtgccgtgtcgtttgattgggatccgaccatcgccgccggcgcggagatgcttgacggcgctcagctgggtgcccgcggccgcgatctgcgtcttgaggatcaggagccgggcggccgtcgccgtaccaatgcggagcgtcgtcgtcagtaccacgagatgatggacgccaaggccgcggtgcgcgaggccatgatggccgaacgtcaggccggtcactgggccgatccgagcgtcgacgacgaccgtcacgacgagcagagcctgttcggtcgcggcgaggacggcgacgagaatgacggcggcctggcctgacacctgaccacccccagtcagcttcgctgccagccccgccagcgggggggctggcgcgaagcgactgaggatggctggcacattcgtctgcggttccaccagcgcggcggccgcagcgtggaacggcggcgtcctatgacaccggcgtctgcgatgattcaagatatacgtgatcgggaagggagtgcgtgttgtccgtcactgaatcggatgtgcgccgcgccatcgcaggcgcacggaccatggtcgtcaaagtcggttcgagctcgttgacgcagccgtccgggcatctggatgtcaagaagctgaactccctggtggccgcgctgtccgccgcctcggcgcagggcgcccgcgtggtgctggtgtcgtcgggcgccatcgccgcgggtttcggcccgctcggcttcgagagccgtccgagtgacgtggcgacgcagcaggccgtcgccgcggtcggccaggggctgctgatggcgcagtatgaggccgcgttcggtcgtttcggcgttcgggtcggccagattctgatcactgccgaagacacgatccgcgcggtccagtaccgaaacgtgcagcgcacgctgaaccgtctgctggaactcggcgtggtgccgatcgtcaacgagaacgattcgctggcgagcaacgagatccgtttcggcgacaacgaccggctttcggcactggtggcaaacctcgtccgggctgatgcgctggtgttgctcacggatgtggacggcctgtatacagctccgccgagcacgccgggcgcccgccgcatcggctttgtgccgaatgtgatcgacacgatcggcgacgtgcaggtcgccggttcgtcgtccggggtcggcacgggtggcatggtcaccaaactggatgccgcccgcgtagcggccgtgtcgggcattcccgccgtgctgacgagcgcgacgaacaccggcccggcgctgatgggcgatccggtcggcacggtgttcgcgccggtgaagcaccgcggttcatcgcgtcggctgtggatcggcttcgcgtccgacccgcgtggagccttggtggcggatgccggtgcggccaaggcggttcgaggcgggcgcgcgagtctgctcgccgccggcgtcgtggaggttcacggcgaattctccgccggagacccggtgtggattgatgacgaggcgggcgcgcatctggctcgcgggctcgcgggcttcgactccgaggagatcccgcagatgctcggccgcaacaccgcgcagctcaggcggttcctgggcgacgagttcgctcaccccgtggtgcaccgcgacaatctcgtgctggtctgattcgtcgcgcaacgagatccgccgtgccgggcgtagtcggggtctgttgttttttcgtgctctgggtttagcatggatggcatgactatggctgactggcagactttttccgaccgtatcaacaatgtggcaccgagcgcgactcttgccgtcgattctaaggcgaaggcgatgaaggccgccggcgtcgacgtgattggcttcggcgcgggcgaacccgatttcccgactcccgcggatgtcgtggatgccgccgtcaaggcgtgcaacgacccgcgcaactacaagtacacgcccaccgccggcttgcccgagctgcgcgaggcgattgcggccaaggtgctgcgtgactccggctacgaggtgaccgccgatcaggtcgtggtgaccaacggcggcaagcaggccgtgtacgaatccttccaggtgctgctcaatgacggcgacgaggtcatcattcccacgccgttctggacgagctatccggaggccgtcaagctggccggcggcaaaccggtcgaggtgttcgctggcgccgaccgtggtttcgagcccgacatcgccgccatcgaggccgcccggaccgagcgcacgaaggccatcatcatcacctccccgaacaacccgaccggtgccgtgtggagtcgcgaggcgatccgcgcgatcggcgagtgggccgtggagcaccacgtgtgggtcatctccgacgagatctacgagcacctcaactatgacggcgccaagaccgcatacgtcggcgtcgaggtccccgaatgccgcgaccagctgctggtgctcaacggcgtcgccaagacctacgcgatgcctggctggcgagttggctggatggtcgcccccgcgcccgtcgccaaggccgtcgccaagctgcagggccatttgagctccaacgtttccaacgttccgcagcgagcggcgctcgccgccgtcgcgggttcgctcgacgaggtgcatatgatgcgcgaggcattcgacgcccgccgcaaggccattgtcgccgccctgaacgatatccccggcgtccactgcccgacgcccaccggtgcgttctatgcgttccccgatgtgaccggcctactgggcaagccgctcggcgagaacggcaccgtcgtgaacacgtcttccgaactcgccgcggcgctgctggacgaggcccatgtcgccgcggttccgggcgaggcgttcggcgcccccggatacctgcgtttctcgtatgcgctggccgatgaccagctcgctgagggcatgcgccggttccgccgctgggtcggctgaaaccgttgcaagaggtcgtgcgcggtatctgccgcgcacgccgcggcacgccgattacgcgccggtcgagacacgcgattggacgaaatcggcaatccccgctaatatggcctcttggcggttttgccaagtaacggacacgtagtcttgcgtgccgggtacagtgggcaaagttcacctagggaagtggcgcaattggtagcgcaacggtctccaaaaccgtaggttgtgggttcgagtcccgccttccctgccaagtatttgcaaccaacacacaaaaggatgaacatggcgaaggcaagcaaggcggagaaagcggtcaagccgaatgtattcatgcgcatcggcctgttcatcaagcagattatcgatgagcttcgcaaggtggtcacccccactgcgaaggaactgttcttctggtctcttggcgtgttcatctttgtcgtgttgctgatgctcctcgtcacgggcatggatttcggtctgggcaagctcgtgctgtgggtgttcggctgatccatcgaccctgaaggtgaaagttacgcatgactgatgaagtgaatctcgataacctcgacgcactggcggatcttcccgattcggccgacacggccgttgaagccgatccggttgcggacgcggcggttgattccatcaatgacaatgccgaagaacagcccgtcgcggctgatggcgccgttgaatccggcaccgccgaaaacgatgcggaagcgtccggcgacgccgacgagcaggaatccgaagaactcgacgcgggcgcaaaggccgttgaggagttctcaaagtcgctgcgcaccctggaaggcaagtggtatgtgctccacacctattccggttacgagaagcgcgtgaagacgaacgtcgaatcccgtgtcgtcagctttggtctggaagacaagatcttccagatcgaagtgccgatggaggaagtcgacaagcacaccgacaagggcaagaaggtcatcacccgcgtccgcgttcccggctacgtgctcatccgcatgtggcccgacgaggatgcccgtcgtatcgtgcgcgagaccgaaggcgtgaccggctttgtcggcccgaccaaggatccggcgccgctgtcccgcaaggaagtcgtcgccatgctggcgccgatgatcgcctccgaagcgctcaagaaggccggcgataagcctgccgcggccaagaagcgcgttgtcgaggtgtcttacgccgtcggcgatcaggtcaccgtcatcgacgggccgttcgccacgatggccgccgtcgtctccgatgtcgaacccaccacacagaagctcaccgtgctggtttccatcttcgggcgcgacacgccggtggaactcggcttccatcaggtggagaagcttcagtaagtcgtcagacgttgtttgcatgaacggcggtcggttttccggccgccgttttgcgttgccggcaccatttgtgccacgacatgccacgcacgtacaatggctctcatggcatccaaaggaaaaccgtcaccgcgttccgcggtcaagccgctgtccaatgcacaagtgagcaggctcgccaaggcgcacacgctcgtcgatccgatgcacgacctgccgaccggccctgatcgcacgatcaacgaggccgaaatcgccgcgcagaaccccaagggcacctcacggctgctcaagggcgtcgatgtcgtgttccgcgcaagctgcaggacgtacgcctgggggctcgacaacatccctgaaaccggcccgttcatcaccgcggccacgcatgtgaccatgttcgacgtgttcgtgccgatggcgtcgctgttccacatgggccgtcgcccgcgctacatggcgaaggccgagatggcgcactggcctctgatcggcaagtggttccagattgtaggcatgcagccggttcagcgccggtccggcaaggcacgagccatcgaggagacctcggtcgagattctgacgagcggccgcccgctgaccgtctggccggagggcacggtgacccgcgacccgaagaaatggccgatgagcatgaagaacggcgtcggcgtgatcgcactggaggcatcgcgccggctcggataccaggtgccgctgttctgcgcggtgacgtggggtgcggcgagcatcaaccactggtggccgtggccgcgcaagaacgtcgtcatgtgctacgacgcgcagctggattacgctgatctgctggtcgacagcgagtcgtggggcgatgagccgcccgtggagctcgccgacgagctgacccgccgggtacgtgtgcgcatgacgcaggtcatggcggagatccgcggcgagcgtgctccctccggctactgggattaccgtacgatgagccgcgttaccgactgattcccgaacacgacggacatccgagacgcccgcgcagcgccatgccgcgcgggcgcgttcatacctgcgcgacgtgcgcatggaggtctcgtatccggggctggagtagggtagtgggttatgaaatgtactgtattgggtgccggcgcatggggcaccacttttggtcaggtgatggcagacgcgggcaatgacgtgacgatgtgggccatcgagcccgaaatcgtggagggcatccgcgaccggcaccacaatgccgttcgtctgccgtccgtcgccaagctgcctgacaacatgaccgccacgggcgaccgggcgcaggccgtcaaggacgccgatatcatcgtcgtcgccatcgccgcccagttcgcgcgcgtggcgctcgccgagttcaaggacctgattcccgataccgccgtcgtcgtcagcctgatgaagggcatcgagcggaacaccaagaagcgcatggatgaagtggtccgcgaggccctcgacctgccggctgagcgtttcgccgcggtttccggaccgaacctgagcaaagagatcgccgaccgtcagccggccgccacggtcgtcgcctgcgagaatctggacaatgcgcgcaaggtggcgtccgcctgcacgaccagttacttcaaggcgttcatcacttccgacgtgatcggactggagatgtgcgggtcgttgaagaacgtcgtcgcgctcgcagtcggcatggcccgtggagccggatacggcgagaacaccgccgcgatgatcgagacgcgtggactggcggagctgaccgcgctcggcaaggccgcaggtgccgatccgaagacgttcgccggtctcgccggcgtgggcgatctgaccgccacctgcggctcgcccctgagccgcaattacacgttcggcgcgaatctgggcaagggcctgagcgtcgaggaggccacgaaggtgagcaacggcgtcgccgagggcgtgccgaccaccgacgccgtggtcgcgctcggcgacgagctcgacgtgccgactccgctcgcctacgcgatgagccgcgtgctgaacgaaggcatatcctgccagcagatgctctccgaactactcggcaccgagatcaccgaggagtaggctgcattacccccccccagtctcgctgcgctcgacagcccccgccagcggaggcgttagcatatgccccgcagcgagacggggtgattcgcgccatcggcaaagctaatctcaccggtgcccaccctgctgagtttggcgggttttgcaagaggcgaattgttacggggcggtgcgccatcgcacgtattaggctatgacccagtatgtgcaaaacatggcatgggaggaagacatggctgaaacggccaagattcgcgttgtggtgatgtatggcggcaaggccgacgagcattcgatttcctgcatttcgactgccggcgtgctgcgcgcgcttgacaccgaccggttcgagccggtgccggtgggcatcaccaagcagggccagtggatcgtggacggcgaggacccgcgcggatgggatatggccgacggtctgccggtcgtcgagaagactcccggctcgcgcgacgtcgtgctggacgtggcgctcgggcaggatggcttcttcgcccgcaatgacgacggcacgctgagctcgctggggcacgtggacgcggtgctgccggttctgcacggcccgtatggcgaggacggcacgattcagggtctgctggagatgatggatgtgccgtacgtcggttgcggcgtgctcgcgtccgccgcgtgcatggacaagcattacacgaaggtgctgctggccgccgccggcattccggtcgctcccggcatcaccgtggacgcgcgcggcttcgacgcggcgtcacggttcgccgctgatgccgatggtctgctcgctcaggtcgaggaggccggactggcgtacccgctgttcgtcaagccgtcccgcgccggatcgagcttcggcgtgaccaaggtggagcatgccggtgacgccgccgagctggccgccgccgtgttcgaggcgagccatcatgattggcgaatcctgatcgagcagggcatcgacgcgcgtgagatcgagtgcgcggtgctgtgcccgaaggccggcagcgagccgcaggccagctggccgggcgagatcgtgctcgacaagcgcaacagcggcggcgaccagttctacgacttcgacagcaagtacatggattcgtcggcgagccatgtggaggtgccggcgaatctgcctcaggagactctgcagcaggtgcgtgagaccgcggtcaaggcgttcaaggcggtggatggcgccggcctgagccgcgtggacacattcgtgacaccggacggcgaggtgatggtcaatgagatcaacacgatgcccggtttcacgccgatctccatgtatccgaaggcatgggaggcgaccggcatcggctataccgagctgatcaccaagctgatcgacggcgtgctgcgctagaaaccgacggcacggttaggagaaacactatgggaaaacatgttggcggcaagctggtgcttgccggagccgtagccgcgggcgccgcggtctgggccatcaagccgcgttcgttcagcgacaagcagcgtcatttcgtgccgtcggttccggacgtatggtatgcgcatcgtggcctgcatgacgcgggatcgggactgacgccggagtatgcggcgcacagcggcgagtatgtggcgctggcgcgtcgctgcgcattgcgtgcgggatacgggaccgctgacttcagcggctcgatcgccccggagaattcgctggctgcgttcgccgccgcctgtgaggccggattcggcatcgaattggacgtgcagctcaccaaggacggccgcgtggtggtcgtgcatgacgataacctgttgcgcgtggccggagatccgcgcaagatcgccgacctgacgtatgaggagctgtcgcgcatcccgctgttccccgcgcccgcgaagccgggggatgccgaggcggcgcccgtcgccgacccggtggccgccgcacagttcgctccgcagggctactaccagcacgtgccgctgttcgtcgacgtgctgcgcgtgatcgcgggacgtgtaccggtgatcgtggagtacaagttcaccgacaacgccgcgtggggcgagcgggcggacgagctgatggagaagggcgaccaactgctgcaggcgtatgacggcccgtatgtgatcgagtcgttccatccgggcgcggtcaactggtacaaggagcaccgtccggaggtgtgccgcggccagttggcagagccggcgtcgctcaccggtgccggggccaaggagtggctggccgggctgttggcgttcgattggatctcccgcccggacttcgtggcgttcgactggcatggcggcccctctccgcagctgcgggccgcacgctggatgggcgcgataccggtgtcgtggacggttcgcagtgcagacgaactagccgaatgcgaccagtatttcgaccgccacatcttcgagtcgttcgttccgaatagcaaatagtctttttatatagtgcgtgccccccgtcgcgaagcgactgggggcattagcgtccgtaagtgcgcgccgaaacgacaagtgcgcgcacttacggacgcaaacagacccatttgcgtccgtaagtgcgcagggtcgtcgttccggcgcgaacatatgaacgcaaatcacctccagtgagcatcgcatcggccagttggctcttccagcgctccaataagtaaggtaagttaacaaatagcggaagacttccgcgagacagtgttgtcgcgacgggaaaaatcgctgttctttgaggggatttgcacaggttttttcacgcatacccattggtatatggcgaaaatttctattttccttggaaattaataatgttaacaacacacgtttgttaagagtgttatcatagaaaactgagacgcgcgtgtcgggcttccgtcatgcgtatccgctcaaggttaagccttagtgctccatgatgaaggtaaggaaatatgagaaaacgagtggtttcagtggcccttgcggttgcactcgctgtcgccccactgggggtgggcagcacagcgtccgccgcgccgctttctgcaagtgatttgcagactctcgcgctccgttcagcggctagctccaatgacgcgaacgccaacgatgtcgccaccgtcgcggacgatgctgccgtgaacggctggacgattgaccgcaacaccgccaaaggcggcgaaattcttgcagccggcactggcgattatgcgggatggactcatttcaagtccacctccgccaacggcaatgccaccagcagcagtggctatccggctgtcgccattagcggcaagacgattgacctgactcgggctggagagttctccatcaaggtcaagtccccgcaggctggttccgcgaaccgtttcggcttctacctcggctacaaggatccgggcaacgccctgttcctgggctatgacaaggggggctggttctggcagaagtatgtcggaggcaatggcgattggtacaacggcacacgtgtcgctgcccctgccgcgaacgctgaaatcaccgtcaacgtctcctggactgccgccaaggttgccacgctgactattgacggacagaaggcgttcgatgtggattactcctcgatgaccgcgctgaccgacaagctcgccatgaaggccggctcttactccggcaccagcgaagtcactgatgtctacttcaaaaacttcaccgtgggtgaagtcgccaagcacaacgtgaccggcaaggtcgtcgacgccagcggcgccgccatcgccggcgccgaagtcgtcaccggcaagaactccgccaccaccgcggcggacggcaccttcaccctcaccggcctcgccgccggcgactacacgctgaccgtgtccgccgaaggctacgatgacgccaccaagaccgtcaccgtcgccgatggcaatgcctcagtcggcaacatcacgctgaacaagtcggccgaagtcgctactgagacgctctccaccgccgccatggacgtgcgcgtgaagaagaacttcccgtccgtgtacgactacacgatgaagaagctcgacggcaagatcatgtacggccagccgaaggacgtgcgcgtcatcaccattaacggcaccgacgtgacgctgaaggactccgacgtgaccttcaagaaggtcagcgcgaccgaggcccagtacacgctgaacgtcaagagcggcgacaagatcaacgcggtcgtcaccgtgcagatcaaggtcgtcgacaatacgctcaagctcaacgtcaccaagatcgtgaacaaggcggatgacgccaagaccgaggccgaggagaacccggtccagacgattgcgttcccgaaccagagcctcatctccgtgcgctccggtcaggacggcgcccagttcaccggcgcccgcatgtcgtccgacactgccaggcccggtgacaccaacttcgacatcaccgccgacaccacggtcagcaatgcgaacgactacacctacggcttcgtctcgggcaatggcctgagcgccggcctgtggtccaactccgagcacgacggcaccaccgtcggcaacaccgtcgccggcggtgcgaggaacacccgcgtgctcacctccacccagaaggtcggcaaggccacctccttcggtctgggcactgcaccgtggtactaccaccgcgtcgtgaccgacacgaagaagaacacctacaccgtcgaagagaccgacatgccgaagatggccgtcgccatcgccggcgacgagaacgaggacggcacggtcaactgggaagatggcgcgatcgcataccgcgacatcatgaacaacccatacaagtccgaggaagtgcccgagctggtcgcatggcgcatcgccatgaacttcggctcccaggcgcagaacccgttcctgaccacgcttgacaacgtcaagaaggtcgccctcaacaccgacggcctcggccagtccgtgctgctcaagggctacggcaacgaaggccacgactccggccatccggactacggcgacatcaacacccgcgccggcggcgccgcggacatgaacaccctgatggagaagggcaccaagtacggcgcccgcttcggcgtgcacgtcaacgcgtccgaaatgtacccggaagccaaggccttcagcgaggacatggtgcgtcgcaactccagtggcggcctgagctacggctggaactggctggatcagggcatcggcatcgacggcatctacgatctcgcctccggcatgcgcaagtcccgcttcgctgacctcaagagcaaggtcggcgacaacatggacttcatctacctcgacgtgtggggcaacaacacctccggcgccgaggactcgtgggaaacccgcaagatgagccaaatgatcaaccagaacggctggcgtatgaccaccgaatggggcgccggcaacgagtatgacgcaaccttccagcactgggccgccgaccttacctacggtggttccgccatgaagggcgagaattctcaggtcatgcgcttcctgcgcaaccaccagaaggacagctgggtcggcgactacccgtcgtacggccaggccgcgaacgccccgctgctcggcggctacagcatgaaggacttcgaaggctggcagggacgcaacgactacgccgcgtacatcaggaacctgtacacgcacgacgtgtccaccaagttcatccagcacttcaaggtcgtccgctgggtcaacagcccgctcgacgccacctccgtgaaggatgcctccgtcaacaacggcaacgagcagatcacgctgaaggacgaccacggcaacgtcgtcgtcctgtcccgtggctccaacgacaccaacaacaccgcgtaccgcaaccgcaccatcacgctcaacggcatcaccgtggcgtccggcgcggtctccccgggcaacagcaacaccgtcaagggcactgagtcctacctgctgccgtggctgtgggacgtgaacaccggcaagctcgtcaagtcctccgatgagaagctgtaccactggaatacccagggcggcaccaccgagtggaccctgccgaaggattggcagaacctcgcctccgtcaaggtgtaccagctcaccgaccagggcaagaccaacgagaagaccgtcgccgtctccggcggcaagatctcgctgaccgccgaggccgagaccccgtacgtcgtgaccaagggctccgagaagcagatctccgtcaagtggagcgaaggcatgcacgtcgtggacgccggcttcaacggcggccagaacaccctcaaggacaactgggccgtctccggcaccggcaaggccgaggtcgaaggcaccaacaacgccatgctgcgcctgaccggtgacgtgaaggtctcccagaagctcaccgacctgaccgcgggcaagcgttacgcgatctacgtgggcgtggacaaccgcaccaactccccggccaagatcaccgtgaccaacggcaccaaggtcctcgccaccaacgagaccggcaagtcgatcgccaagaactacatcaaggcgtacggccacaacacgtactcgaacactgaaggcggcagcagctacttccagaacatgtacgtgtggttcgtggctccggaaagcggcgacgtcaaggtgacgctctcgcactccggcgcatgcgacaacaccgaccatgtgtacttcgatgacgtgcgcgtgcttgagaacggttacaagggcctgacgctcaacgctgacggcaccctgaagacgctcaccaacgacttcgaggacaatgcccagggcatctggccgttcgtggtctccggctccgaaggcgtcgaggacaaccgtatccacctgtccgagctgcatgacccgttcacgcaggccggctgggatgtcaagaagatggacgacgtgctcgacggcaagtggtccgtcaaggccaacggcctgatccagaagggcacgctgatctaccagacgatcccgcagaacgtcaagctggaaccgggcgagacctacaaggtgtcgttcaagtaccagtccggctccgacgacatctacgccatcgccaccggtgacggcgagtacaacgccagcaccgtcaagctcaccaacctgaagaaggccctgggcgaggacggcacggccgagttcgagatcaccggttccatcaccggcgacagctggttcggcatctactcgacctccaccgctcccgacctgcagaacacgtccgattccgccgccaacttcggtggctacaaggacttcgtcctcgatgacctgaaggtcgagcacgtggcatccgccgagcacaccaaggccgacgccgaggcgaagctcaaggaagtcaaggacacctacgacggcaagagcggcgactactccgccgaagtctggaccacgtacgtgaacacggtggccgagatcgaggcgctcatcgccaaggataagcccgactacaccaccgcctacaacaaggctgtggcgctggccgagtacatgaagaacgcaccgggcgacgactcgaacgatgcgtacgacgtggcgaccgacgcctacaccgtcgaggcgggcagccagcaggcactgtcgggcggcaatgagggcccggcaagcctcgcccaggacggcaatgccggcactcactggcacacctcctggagcgccaacgcagtgtccgccggtaccgcctggtatcagttcaacctgaacgagccgacgaccatcgacggtctgcgttacatggcccgcagtggcggcgcgaacgcgaacggcaagatcaagaagtacaagattacgctgacgctgtccgacggcaccaccaaggacgtcgtcaccaatggcacgttcaccacgaccagcggtgtctggcagaaggtcaagttcgacgcggtcaagaacgtcaccaaggtgcgcatcaccgctctcgaaaccgcgggacagtccgcgggcgaggtgaacacgtacgcctccgctgccgagctgcgtgtcaccacggttcgcgacgtgccgagcaccgaggtcaaggtcaacaagtgcgatctgcagaacctgtacgatgacgcttccgccctgaccgaggccacctacaccgccgacacctggaaggtgctcgtcgccaagcgcgacgccgccaagaaggtgctggacgacgagaacgccaccgcgcacgacgtggctctcgcctaccagaacctgaaggatgccatcgccgccctggaagagcgcgtggacacctccaagctcgccggcctggtcgccgatgccgagaagctcaaggaatccgcgtacaccaaggattcgtgggccgcgttcaagaaggctctggatgccgccaaggccgtcctgaacaatgcgaacgccaccaaggctgacgtcgatgccgcgtacaacgcgctgaacgccgcgatgaaggccctgaagcccgcctcctccaagccgactccgaacccggagacgaccgacaagagcaagttgcaggccaccatcgatcaggccaaggccctggatctgagcggttacacgaagaagtccgcccaggccgtgcgtgacgccctcgccaaggcccagagcgtcctcgccgatgacaacgccacccaggctgacatcgacgccgcgcagaaggccctcgccgacgcgatcgccgcactggagaaggccgatgccaacggcaacgccatctccaagacgggtgcgaacgtcgccgtcatcggcatggccggcatgatgctggtcgccgccgctggcgcggtgttcatcgcccgcaagcgcgccgagtgatataagtaaatagaaatagggaggtcgccctgtggcggcctccctattttgtattcaatccgttatggatggccaggaccgcgtcattctgcctccgccagcgggggcaaatatgtagtcctttgttttatatttcaggcgtagatgtttctcgggcgcatgtcctccggcaggccctccagcagtgtcgccacggagccttcctcgaagacggagcggatgccggcggccagcagcggcgccaccgacagcacggtcatgttatccaggcgcttctcctgcggcactggcacagtgtccatcaggatgatttcgcgggcgccgcaatcgcgcaggcgctccacggccgggccagacagcagaccatgcgtggcgaccagagtcaccgaggcggcgccggagttgcgcagtgtgcgcacggcctcgcagattgtgccggcggtgtcgatcatgtcgtccaccaccacgcagtcgcgcccctgcacgtcgccgatgatgccatgcgcttcggcatggttcggtcgcgtgatgtcgcgagtcttgtggatgaacgcgagcgggagcccgcccagcttggcggcccactgctcggaaactttgatgcggccggcgtcgggggagacgatcgtcgccttgtccataggcacgtggctgcgcacgtagtcgatcagcacgggcatggcggtcaaatggtcgaccgggccgtcgaagaagccctgctcctgcgcggcatgcaggtcgacggtgaccagacggttcgcccccgcggtgcggaacaggtcgaacatcaggcgtgcggtgatcggctcgcggccctgatgtttcttgtcctgacgggagtagccgaggaacggtgccacgacggtgatggacttggcggaggcgcgcttgagggcgtcgatcatcagcagttgctccatcacccacttgttgatcgggttggtgtggcactgcagcacgaacacgtcggcgcctcgaaccggctccgcgaaccgcacatacatctcaccgttggcgaagtcgtatgcggtggtgggcagcacgttgatgccgagatattgagccacttcattggcaagctcaggatatgcgcggcccgtcaccaaggccagtcgcttatcgggtgtgccctcaaggatcgccgacatgtttttccgctctttccgtcgatagtttcgttaccgttcaccgtggtgatacgttgccgtacacaaaccttatccaatatacaagaacccgccgtcccaagaggaacggcgggttgcgatgctcacggattcttccacttacggcacggtgcgcgcagcaggtgccccgtgccgggcgaaatcattccgatcagtcctcgtccagcgtgatgtccagcttgtcgccgtccagcgtgaactgtccgctgatgctgaagctggtggaactgtccgtcggctcccaggagtcgtcatagttcttgtactcgtacgccaccttggcttcgccgccgtacacgtagaagctgcccgagtcgatgctgaggtcatcagtggtgacggtcgggtattcggtgatgttccatgcgatgttgcggtagtcgtcatcggaaccgtacatgctgaacgggcagccttcaggctgtgcatccgtggacttggcgcaggtatccagcttgtccttgatcttcgcgttgatctcgtctgccagagcgtcggtcggctcggcagagatcgaggcggaggattcggaggaggtggtcagcgtcgtcgaatccgcggtcagatacttcgacgtgaccggtttcaccgtgtacgagcccggatacacattgaaggtgtaggtgccggaatcggatgctgtggcgttcttcgcgccgaccttgacaccgttgacggtgaagttggtgatggccggtgacgcgtagacggagatctccttgaccagcggcgtcgtgatgttccagttcttgaagatcaggaacttggatccgttcggcgcgaccgtcagagtgtcggtcatggacttgccgcccagcgtgtacgagatccgcatcgtgcgggagccgtccgcgttgtcggtggcggagatgatgcgctggttgctgatcgtggtcttgtcgcccttggaagccgcattggtgagcagcgtgcgcttgccgttggcgacctgcgggtcggagatgccgttggccttgtcatagtcgccggacgcgatggccgacaggtagctcttcacggtgttatcggcgctgaacacggtggagttgaccactgcgtaagcgataccgagcagggcaagcacgccgacgatggcgctgatgatgatggccagcttcttctgctgcggggtcatggccttggctgcagccggggcggcgggagcagccaccggaacgggggcgacaggtgcagctgcaggagcggcaggagcgccggcaggaacttggacagtcggggcaccaccttgggcctgaaaggccgcggcgtcggtgccggcagcgggaaccccctgaaccggagcaccgggaacgggaacgccctgaaccgggatgccagctgcgggcgcggtcggcgctccggtgccggcgccaggctgtccgccgaaggacggctgcgggccggtgtagccggcggccgcggcgacctgtgacgggaagcgaccaaagtgcgctccgcatgccgccgcatacgcggtgacctcggcgggcgtcgggcggaccgtgccgccgacgaacagcttccatgcgccgcccatcgacagcaccatggccgggccgaatgtcagcgccaccacctcgatcaggaacgaccatacggccgcgacgaggaagtaccatgccgcgatgttcagcgacgcgtcagaggtatcggactgcatggtgtaacccagcgtcgcggacgtgaacaggaacgtgacgatcagccagatcaccagcgtggcgaccggagacttccacgagtgctgccatcccgcatatgccggatcatagatgttgcgtgccgcggcgcgcaacgcaatgtagaacgtggtgataaggaacgccacgaataccagccacagctgccacggtgcgctgatggagccgacgtactggttcgagatgccgaacagcgacaggttagcgatattaccgctggccgtgatgccgaccgcgccgaacgagccgagcgcgaacgtcaggaacgaaaggtacggcagcagaatcgggaacagcatgaacatctggccgttgtgcaggctgctggacagcatgatcaggcaaatgaagccgatcaccgtgaacacgaccgcgtagatgaacgccgcgtcaagcagcgtgcgcacgaagccgcgcgtgcggtgagcccacttccaggccgcggtgaacacgttgttggaatccgaggcgtactgggcgagcagatagccgaagaacgcgccgatcgcggcgagcagcagcgtcatgaaatacgtacgggcggagacgccggtcaggatggccttggcctgaatgccgcccatgctgccggctcccagcgtcagcgggaagatcgcggcgagaatcagatagacgaatcccatcacgacgccgacgatgacgctgctgacgatgccggtccacttgaaccggatggcgaacttacgcgcgaaccagtatgcgccgaacgcggtgccgagaaccagcgccacgccggaaagaccgacaggcatccatagatggccggacacgccgaaggacgacatggagaggttgcctccggtgatgttgggcgacagttgaccggatacgcccagaaccatcaccagaatcaggaactggaagaagttcggcgtcaccgtgccggaaccgctggcgtcactcatcatgtgggacaggccggggaccatgctcagcttggacgcccatgatgagccggccgacaagaagaagatggagccgatcagggccagcgccatcgcgccgatcaagccgaaggcaaggctgattgcggcggtctgcagcgaacgcgcggagaacagctccttgaacatcgggttggggacgaactgctgcggagcgccgggctgaaccggggcgccgggtgcgccgggggtaacggggacaggtgcgccggggacgggagcaccaggcgcgggcgcagcaaaagtgccgggagcaggtgctgcagccgcaacaggtgcggcggcgggaacttctcccgccggagcggcgactggcacttctgccgccgggacgggagctgcaggagcttcttgtgcggggactggttcgggaaccgccgggaaggccggctcggctgcgggctgttccgcgccggggaatgcgggtgccggctcgggctgcggtgccgcggcctgcggggccggtacgggttcagggaatgcggcgacgggagcgggtgcttccggctgaggcgcggctgcggtgccgcgtggagcggtgccgagcacggtcgaatcttcgacgttgtcgttgctgtttgctgcggcgaccgcgagcgtctgcccgcattgcgtgcagaatcgtgcggcgctggacagcgtggcgccgcagtgaggacatatcatgacaagcccctttcttggtttgctcttccctccttattgtatagtcgccacgtcatcttcagcagcttattcgcggtatttgggcggggcatataaggtatgttttcgcccccatcgggcaggtaatccgatatccgataggggcgaaaacatgccaatgcattctctgtgcctgtggcgtcatctgtccatgaatacgttgccgttggcggcgaggcatgccagcacttccggtttcttcatgtcatacgtcgtgttgacggtctctccgggagcggcatgacccattgcgttcgcctccttctcgtattgttcgacggtgtaggatttcggcaccagcccggcgcgcttaaggcaatcgactgccccctcctcatgagacgcatacagattgggattgccgacttgtgccatatacaacgcgtccaccgaatccacggtggcgattccacacgcgttcaagtccttggcctttttctggatgtagtcaaggtcatctgctttatctgaaggaagtacgtctccctgtggctgctggatgccgttggagtaagttttcagtgtcggcctcggatagcccttgtcttggacgcacgtgatgtatcggctccatgcggccttgtaatcggacagacttattttgccgcttgtcgcggccttgcgcagtgtcgctttctgcgcggggtccattccggagtcctggccgagcagctgcgtcgcataagcctgcaaagatgaggcgagacggttcccgcccgagccggaatccgttgcttggttcgtgttccgtgccgtgccgcatccgcacagcatcgcaatggaaagcgtaatgacggcgatgacggcgatggccatcgtcaccgtacgacgggatgccggaatatgccccattcttactccgatctgcatgataatctcctcttcgaaatttcatcgatctttaattttaatatttgaaagacatctcggtcaaatggttgcggacgtcatttggggtccgtatcgcagtatatttgcaggggaatgctgtcatgcagtgtaacgttgagcgcaggatagtcatgaggagagattatgcggtgttcccgttgtggtgcgaatgtcgttgagggcgatagattctgcgagaactgcggggcgcccgtagccgtgcaggcgggttccgtgtgcccggtgtgcggtcagcagtcggaacccggcatgcggttctgccagcagtgcggtgccgagctgtccgccggcccgcagcccgcacagccggcccagtcggatgacgacggcccgaccatgctgagtcagtcccctctgctgaagccgccgttccaggcaccgcaagcaggagtgcctggaacggggcaggatgaccagttccagcagaccatgcaatccgattggaccgtgccatctactcagccgcaatctgcgcagccggtgccgaccgcccagccggtgcctcctgcacagccttatcaggctgttcggcagtacgcggggcaatacggtgccgcccagcccggtgccgtcttcccgccgcaggccgtgcagccgccagcccaaccgtcacggcctggagagtccgccggcaagggcaagaagaagaccgcgctgatcgtcggtatcatcatcgccgtactcgtcgtggcgcttgccgccggattcggcgtctggtggttcatgctgcgtgattccggcacccaatcggctcagacgcagtcgacatcccagcagagtggcaagaccaagtccggcgacagcaaggccgcgaaagacgacaagccctgcaccgctgcgcccgatgccgagctgagttccgtcgaccacagcgacaccaatctcgtcgcgcagctgcagctcacctccaactgcgcgtcgacgaaggacggcgacacggcggagttcaaggaatccgacgtcaaggtcagcatcaaggacgatgatggcaatgtcatcgcctcggccgtcttcgacttctccaatcagccggtcaagttcaatggcgagacggccaacgtcgcgctcgaattcaccacgaggcagtactggcgcccgtacgaccagatcgagaccggcagcgccgaggtcatcctgcagaccggtcagagcggcaccggcgaggcgggcagtgcggacggcgacgcgttggcgggctccgacatcgacagcgaggatgccgagcggtacgcgcagcttgcgttgagctggcagctcaagcatgacgaatccgccgcatcccgcttctacaccacctacaccacgcagctgtccagcaagaaaaacgacatgaaggccgacggcaagacctggcattacgtggacatctacgagcagttcctgcagcagcgcatcaagcacaagaacgcgatcctgatctggtccggcgattacccgacgtacacgaaggccgacgcttcgaccgcatattacgtgatcctgtcgggtgatacggtcgactcggtgaaggccggcgacgcatggtgcaagtcgaacggctatggtgccgcggattgcgcggtcgtggatttgcagtaggacggattaccccccccccagtcgcttcgcgacagcccccgcaagctgtcgcgggcatggcgtagcttagagaagttgctgttttcagcagcgcgtatacacactcctgccatggatagtccatggccgactagtccgaaggaggtgggtgatgtctgcgcataagtacgaactgatgttcattgccgatcctgagctggatgagcgcggtctgaagaagttgaccgagcagtatctggagctcgtcaccaaggaaggtggttccgtcgagaacaccgatatttggggacgtcgcaagctcgcttacgagattgacggcaagaccgaaggcaactacgtggtggtcaactacacgaccactcccgaggtcagcgccgagctcgatcgtgtgctcaacctgaacgaatccgtcgtccgcacgaagattcttcgtaaagacgccaagtaagccgtatgagtttctgattgttcgcgactcgctgaaccaaaggtaagaaggtaagtcatggcaggcgaaaccatcatcaccgtggtgggcaacctcacggcagatcccgaactgaggaccacgggaaacggcgcttccgtcgccagtttcaccatcgcctctaccgcgcgtacctacaatcgcaacaccgggcagttcgaggacggcaatgcgctgttcatgcgctgctccgcctggcgcgatctcgccgagcattgcgccagcacgctgtccaaaggcatgcgtgtcatcgcgcaggggcgtctccagcagcgctcgtatcaggcgcaggacggctcgaaccgcaccgtcatcgagatgacgattgatgagatcggcccgtcgctgcgttacgcgaccgcgcaggtcacgcgcacgtccagcggcaacggccaaggcggatttgccggccgtggcaatggcggcaatggcggattcaacgccggccagggcaatggcggcggtttcggcggcaacgccggcggctaccagagtggccgtggcaatggcggcttcagcggtggctatcagggtggcggcaatggcggctaccagggtggcgcgtccgctgcgggcaacgccggccagagcgccgcgcccgcgaccgatccgtggggcacgtccggcgatgccggctcgtccttcggttcgttcggcggctcgtccgatttcggtggcgattcgcaggaacccgagttctgatgcccgtccgcggccacatgaagccgcgcgacgcacgtaacaatccagaagcaagcattcaatcgtaattttcaaggagaacatcatgtcacgtaagaggccgcaaccgccggtcaagccgttcaagaagaagccgaatccgctgaaggccgccaaggtcaccgagatcgattacaaggacgtcgcgctgctgcgcaagttcatctccgatcgcggcaagattcgttcccgccgtatcaccggcgtgaccgtgcaggaacagcgcgagctctccaaggcgatcaagaacgcccgcgagatggccctgctgccgtacgccaccaccggtcgctgagttagggaggataagaaatggctgaatccaaggttattctcacccagaccgttgccaacctgggccactccggcgatgtcgtcgccgtccgctccggctacgcccgcaactacctgatcccgcagggcctcgccttcgcgtggaccaggggcgccgaagctcagatcgtgcagatgaagcgcgctcgcttggccaaggccgtcgccacccgcgaggatgccgtcgccgccaaggccgccatcgagggcactaccgtcgagatcgctgccaaggtttccgagtccggcaagctgttcggtagcgtcaccgccgagcagatcgcgctggctctctccgacaaggccgcggtcaacccgaaggccatcgaggtcgagccgatcaagaccaccggcgacttcccggctaaggccgccctgcacccggagatcaccgcctccttcttcgtgaaggtcgtcgccgagtaactccggcccatcagacagattatcgtctgagcttaagcatcagcccctccgccgctccgcgcggcgaggggctttttgtattgttccaagtcgcagcgaatgattctcaataaggaaagtgcgaggattgcgaacatttacgcacaagtgaacaatatgagaaaacgctgttttccaaggatttgcggacattgatgttcatttggagttgcggcgggctcgcacctttcttaatgagaatgatttgctgcgaggatgggcgttctcaagacgcggaagccaagccagccccgttcaactcgttgacagcggcgaacggcatcaccctcaaagccggtgagtccctgctgctcaaggccggcgccacctgcaccagcgcgacccagaccatcgacggcgcctcggtcaagaccggcctgcgcgtcatcaactccaaaggcgccaaggacgcgcccatcaccatcggagcgtacggcgaaggcgccgcgcccatcatcgccggtgcgggcgtcagcgagaccatcctgctgaagaactccgaatacatcacagtgcagggcttcgaagtcaccaacactgatgcgaacgcggccgattacgagaaatacatgcgccgcggcatcgccgtggacgctcggcaacgccgacaacacgaagaacaacgacaccggcggtgccactcggcgcccgaagtccgaactaaaccagaccgatgccgtagtctccggcgagtacgcggcgaaactcggcgaacagctcaccccgtacaagggcgacaccatcaaccagcacacgctgtccgagacgccgggcaagacgtaccgtctcggcctgtgggcgacgctcggaaagagcaacgacgacaccccgtccacgctcaaggtgcaggtcaagttcaacctcgcgtcgcttggcgccgtcagctcgttcagccagtactgcaagaccgtgctgagcgagaccgtggacgccgaaagcaaggaaggcggcaaaaatcactacagcgggtcgttcatcgtgccgctcgacgtggacccgtatgccgcgctgtgggtcgccatctcgcagaccgatccggcctccggctcgttcgcgtacatcgacaacgtcacgctcgtcgaggactccgcggccgtgtccgacgtcgcgtcgatcgccgtgaccactcagccgaccaagaccgaatacgacatcggcgacgcgctcgacctgagcggcatggccgtcaccgccacgatgtctgacggcacaccgccgagctcggcgagggcgaatacacggtctccgagttcgactcgtcgaccgccggcgaaaagaccatcacggtgacgtacgccgccgatacctcgcttaccgccacgctcaaggggacggtgaaggaggccgagccggtcgacaccgtgccgccggtgatttccggtgcggatgacgtggccgtggagttcggtgcgtcgtttgatccgatggcgggtgtgaaggtggttgatgatgtggacggtgatgtgaccggtgccgtgaaggtgtccggtgacacagtggacacgagcaagcccggcgcgtacacgttggtgtacacggtgagcgatgcggccggtaacgaggcgtccgtgacccgtgtggccaccgtcaaggagaagtccggcgagacgcccgtcgagcctggcgacaaggagcccgacaaggagccgggcaaggataccgacaaggacggtgataagaacgaccaaggcgacaagaagccgggcctgtccgcggctgacgcctcggtgtccgtcgttgccatcgccgcaatcggcctgcttgcgacgggcgccgtgtctgtggcggttcgccgccgtcgcgacatctaaggcgcggatttcctgagtcgcgttgaccctgagcggctcggggccaacgcatggcattgatgccggtcgaatggctgtcccattcgaccggcatcttcgtctattttggccttgcccggcgtgattccacgatgtatgtgctgctatcttcgtttcgaggggttgattccactgcctgggaacatctatctgcgtttcagggggtggccaaaacactatgcacggagtatatagggcatttgctcattgaaatcatgcggtttgcgtgatgtttatactttgctaccaaccccctgaaacgcagatagatgttcgtcgcggcctgaatcaaccccttgaaacgcagataggggcggattgcgaggatcacccgggcgggggcatgcttccagtggcgaattaggggtgatttgactcgggcgcaccctctcgacgaaaacaaaaaaaggtcagaatctttcgattccgaccttgcttgtgcccccgcagggattcgaaccctggacacgctgattaagagtcagctgctctaaccaactgagctacaggggcgttggtcatttcttgagccgagtgataactatactcagaactcgctgcgatgcaaatcggcgtgttgcgtacggcgtgtcgcgagtaattccaatgggttccacatgactgcacccaagtgtgcatggcagggcagggtgtgaatcaccggggattctgccgtccaatccgcccgtatcgccgttcgtcaaggggtaaagtgtacaatcacgtcgtttgctttcgcacccagcgaaattgagtcgccgggagtacgaaagaaatccaatcatccagagaccgtgagcagtcagccatgtctgcgatgcggtggagagaaaagaagaagccgtggaatattccctctttaccaagctggctgccgagttcttcggcaccgccatcctgatgatcttcggcaatggctcggtcgccaacgtcgaactcaagaacacgaagggccaccacgccggatggctgaacatcgccatgggctacggtttcggcgtcatgttcccggtgctcatgttcggcggcgtgtccggcgcccacatcaacccggccatgaccctcgcccaggcgatcaacgggctgttcccgtggagcgacgtgctgccgtacatcgtggcgcagctgctcggcgcactgctgggacagttcatcgtgtacctgacgtattacccgcactacaaggagaccgaggacgcggaagcgatcctcggcacgttctgcacgaccgacgccgacaacgacaagatcaactacttcctcaacgagatgtttggcacgctggtgctggtgttcggtgcgctgtgctgcctgatgctgccgtggggttcgaaggatttggcggccgcgtcgatcgtggttggcttcatcgtatggggcttggtgacctcgatgggtggtccgactggccccggcctgaatccggcccgcgacctgatgccgcgtctgctgcacgcgattctgccgattccgaacaagggcacctcgcgttggggagaggcgtggattccggtcgtcgctccgattgtgggcgccatcgtcggcgcgtggctgtacgtgttcttcttcgcgtgatttttgcgtgaaccgcgtgagccgtggcgggctcgcgtgacgccacgcgtgttgcgcggccccacggctgacgggatacaatgcagggagagacgcctgcgaaaagcgtgcccttgtgctcgcgctttcgcggggcggcgcggcttgacctatgacgttgctgggagtgattgaagttgcagcggttgcgtggtgacgatatgcgtcgggtgttccgcgcccggcgcattgccgtatgtgcggggttgattttggcgctcgtgttgtttgttcttgcggtgcgggcgagcgtacttcgcgtgccgggcatgggcggtgagcggtcgtccatcgcgcagccaggtgcaacagcgcagccgcagtctgcgggggagcagaagggcggcgattccgcgaaatcgtcggccaccgcgaaatccactaattccgaggcacagtcaaacgggtatgacccctcgaagccgttctcgcaggcgcagcggcgcgagattctcgagaaggcgcagcagaccgcggcggccagcggcaaaccccgccacgaataccattactgcgtgtccaccaaggggagcgtcggcgataccggcgagttcgggcgcacggtgtacgcgacgctgaatgattcgcgtgggtggccccgtgccggtctcacgttcgtggagagcggttccagcaagtgcgacatgacgtatatcctggccgcggcggagtatatgaaatcgttctcgtcgctttgctcgtcgcagtacagctgccgcgtcggcaatcaggtgatcatcaattatgaccgctggcgcgagccgaccgacagctggctgaagggcggcggcaatctggcgaattatcgcacgatggtcatcaaccatgagaccggtcaccggctcgaccatcgcgacaatgagaccgtatgccagcaggcaggcgagccggcgccgctgatgcagcagcaatcgatatcgttgcgcggctgcacgatcaacgaatggccgctcgactcggagctctgggcgcggtggtgatcggacgattcgcgccgacgccgtccggacgaatgcatatcggtaacgtgtatgcgatgctgggtgcgtggctgtcggctcgtgcgggtggcccagagcgtacaagccggacgggcggtggagcgggcgatgcggattgcccgaataacgtgaatcgcgtggatggcatgagtggcgcagccgatccaggcgatgcggacggcgggcgagggcgcatgctgctgcgcatcgaggacatcgacaccccgcgcgtgctgccggacgcggaccgctggatcatggacgatctggcatggttgggactggactgggatggagagccggtataccagtcgcggcggctcgacatctacgagcaggcgttgcgcgcgcttcagggcattgacttgcgagacgctgccgcgttcggtggccgtgatggcgttgacggcaccgagaccactgcgctgatatacccgtgtttctgttcgcgcgccgacatccgtgcggcctcggcgccgcaggaaggcgaccgtttcgtcatgtatcccggcacatgccggcgcgcgctcgccgagcatccgcgacaggtcgagcaacgcttggcgaatggtgatcggcattcgctgcgcatcgccatgcctgtcgccggcgacgcgcgtgccgcggtcaccgtgcatgatcgcgtgttcgggaactgccgattcgatttgccgcgcgatttgggcgatacggtggtgcgacgggcggatggtctgttcgcctatcagctggttgtcacggttgacgacttgctgatgggtgtggatgacatcgttcgcgggcgtgacctgttgcgatccgccgcgctgcagctgtacatccgtgagcgtctgctcgacgccggcttcggggatagctcggatggcggcgttgccgcggctcatcgcgatatccgtttcgcacatcttccgctgatcgacaatgcggccgggcggcggctcgccaagcgtgaacggtcgctggatatgggaacgttacgcaaacatggcgtcacggcgcatcgggtgatcggctattgcgcgtggctgctcggattgcagcaagagcccgagccgtgcgctgctgccgacctgttgcatggattttcgtgggatgcgctcgccgcggattcgcaggatcgttccatccccgacgacccgttcagcatcggattgtgagattcctcctctatatgctgcatgcggagccgtttcgcgcttcgcccccccccagtctcgcatcgctcgacaccccgccagcgggggccacacccgaagttcccggtttctctagccgattcgccctcatccgtgggcatactaatatatggtgcagcaagacggatagggagcatatgatgaccgcttacatggatcacaaggatctgaccaatgaaagcatcgacgagacgcgggcgacgcagattcgcgatggcgtgcatcgcgtgcttgacgccatcgccgaagccgagtcggcggccggttgcgctcccggttcggtgaagctgctggcggcgacgaagacccgtgacgtcggcgagatcatggcggcgatcgatgcgggcatccgcatgattggcgagaaccgcccgcaggaggtcatggccaaggccgagggactgcgtcgcctgtgcgcggaccggggatttgcgctcggcacaggcgacggcgacaccactcgaccgtctgacgccgaacacatcccgttccatctcatcggccagctgcaggccaacaagatcggtaaaatcctccccgacgtcaacaccatcgaatcggtggacggcgttgaactggcgcagcgcatcgcccgccgtgccgtcgcccgtggaatcacggtcggcgtgcttctggaagtcaacgagtccggggaggcatcgaaatcgggttgcgacccgcaggctgccgtcgacatcgccgcacagatcgcacagctggacggcatccggctcgaaggcctgatgaccatcggcgcgcacgtcgatgacgaggccacgattcgcgcctgctttgcgcatctgcgcggcacgcgcgacacgattctcgcctctcgcgcgcccggcaccgagcactgcacggaactgtcgatgggcatgacgcacgacatggcgctcgccatcgcggagggtgcgacgattgtgcgcgtcggaacggcgattttcggcgaacgcgcgttcatctgacggattgcggcaggcctcggcggaaaggggccgggctgtagcgcccgcgctgcgctgccggcttctcgactgccgtttgatggtgggcatacgatgggggtattggtgtcggctgacggcaacgtgaggtgagtgcggtcatgaaacgtgatgatatgcgggcgagccgcggcgcgcggactgacgagagtgaagagggtgccgtgccggtgtcatcgagtgatgatatccgtgtccatgccgtggtggcgggtctggtgcagggcgtcggattccggtatttcacggtgatgaccgccggcaagctcggcctgggcggttgggtgcgcaactgctacgacggctcggtggaggtcgaggcgcagggggaacgcggcaaggtcgcccgtctgatttcggcactgaagcaggggccgcgctatgccgatgtcgaacgagtggacgtcaccgagatcccgctgcaggagctgaagccggcccgtcatgggttcccctcgttcggcgtgttctacgagcgatagtttcgggtctattgagacggaactgttccaccggcagatgatggtaaatgacgttagccgatggttcagcccactgtcagaagcaatatataactttgcccccgctggctggctcttgcgaagcgggcaggagcggtttgcgttcctaagtgcgcgctgaaacgttcagcctgcgaacataagaacgcaaatcgcacgttttgcgttcttatgttcgcgtactcgtcgatacggcgcgcacttaggaacgcaaaagagtctgcgtaatctcacgacgagagcctccctcagtcttgttgtgctttggcgggagcagacacttcgctgatacagcggtataccgttatgtaagaggcctcaggccttgatctaagccgcatctcggtatatttcccaagaattttccccgtagggaagggggtatggcctgattcccgaggaccttatgccgcaagggctgtgaaagcggtttttctgcgggggggggggcatgtattcggcgttatttcaatgtttcgggggattgcgtcgatttttgggtgcggatacggtcaggagttaacaggccgatggaagtcgatgatttgcgcgtgctgcgacggtgagagtcgcaatcgtgagtctttgtcgaactgctgaacgccggatgaagagttttggaaatgatggaagggatgcttatcgtgactaagcaggatcggaaaccatcgcatacgagggcgatgcgctctcgcctgatcgcggccgccgtatccgtcgcgaccgttcttggacttgccgtcaccggcactgcgattgcggccaatgtggggacagtcgcacccgaagccgcgcagtcggccacgacgcaggcatcacaggccggcaccggcccgatcagcggcgtcgcacagggcgacagcgctcagcagggggcgtcatctgccctgaccgatcgcgccgggactggtgcttcggggcagaccgccacggtcaaagcgtcggctgcgcctcgcgccacggcgaacgacggcaaagtgaagataaacctattcgattattgggacagcagtgatccgaagggcccggcaaaggcctctggcaaagagaacgtgaactatgccacgggcggtaccagcagaaatgaggcggctgcagcattctacttcaactacttcaacggaaaaggtaaggattggaacggctggactggcagtgcagaaacctctccgggcatcgtcaagacgaacctcaccaagaccggcgctgacgcagttccgcagttctctacgatggtgaccaataaaaataatgcacagaccgacatgacgtatttgttcacagaaagcgagtgggccaaggcatataccaatggcggcaatgggctgacggggctgttcgatccgacggaagaggccaagggccactatgtgtacgactccaatacgacgtacgccgcgctgaacagtgccggtaccggatttgaccggtcagcaacatggaccgagagaactgacgcgtggattccgaaattcctgccgttcaatgcggataaaagtcagctgcggatcggctttcattcagtgcgcggcgcccggtacgccttcggtatgaccgcatacgcgaagttcatgcaaccgaaagaaggcaaactcgttgatggttccccgatgacgttcaacttcacgggtgacgatgatctgtggctgttcgtcgacggcatgcttgtgttggatatcggtggcatccatgatgccgccagcggctccattgatttcgcgaccggtgtggtgacgattgtcagcaataaaaccactacgaccacgttgcaggcgttgtttactcaggcgctcaaggaccaaggcaagtcggatgccgagatcaccgcttggatggaatccaatatggtcaaagcctccaatggctcctacaccacgttcaagaactacaccagtcacgagatgaacatgtactacttcgagcgtggccatagtggttccaactgcaagcttgacttcaatttggtgactcttgactccagccatattcaaatcggcaaggagacggagaacgttcctgaagctgacaaggacaagaactatacgttcaacgcttatgtcaactatgagggaaccgacagtgacaaggattacacgttgtacacgggtaaatacgacgtgtacaacaccgccaccggcaccaaggacggtgaaacccggaccacggattccaatggcgtgatcacgctcaaggcgggccagtatgccgtgcttttgggcagcgacgccaagaggatcaccgagtcctcgaagtacaaggtgacggaaatcaacgttgaccaggacacgtatgcggtgagcgccaatggcggtcaggtcaaggtgacgcaggagaaggattctgcgaccacggagccggtgtcggtcggtgaggtgccacgtaccacggtgacgaacacggtcgtcacggcgccccggtaccgcaagtacatcaaggcgaacaatgatggcacctatgacctgtccctgaacgtgaccggcacgcagtccggctcgtcgcagacgaccgtgtccccggccgacatcgtcgtggtgttcgacacctccggttccatgagtaacccgatgggagacaactctcgtcttgaggttgcgaagactgccgtcaacagcatggcgcagcatctgctgacgtctgagaaccagggcaaggatagcaacatccggatggcgctggtccccttctcgacgacggcgggcaatgtgtcgaacttcaccggcaacgcaatggacatagtcagtgccgttaatggtctgggcgccgatggtggcacgaattgggaggccgcgcttaaagccgccaatgccaagctgacttccggtcgtaagggcgtgaagaagtacatcgtgttcatgtcagacggcgacccgacgttccgcacgagttccgtgcggaccggcactgattggtggggccgtccgacctatgatgacgatgatcgcagtggtcttcctgccggggttcatggttctggcagcagtgatcgatatggggcgaatctcagctccgctgttgccgaggctaacaggcgtggcgatgcgacgttgttctcggttggcgtgtcctccgatccgaccaagatgcgtggcttcgccgatcagacgaagggctcgtattacagcgccaccagcacggatgagctgaacaaggcatttgccgatatcatcggtcagatcaacaggaagtcttcgtacaagaacgtgtccatcaccgatacgctgtcggactacgcggagttcgttaatgctgacttcggctcgaatgatgtgacggtgacggcatctaaagacggtaatagtgtcgatctcaacgagagcgattacacggttaccgtttcgggcaagacggtgaaggtcacgttcgcggacggctatgagcttcaggatggcgtgacgtatacggtcacgttcaaggtcaagccgacgcagaaggcctacaacgagtacgccgccaacaaacagaatgacgacaagaccggatataaggatgttcttggtgccaacaacactgatgcggatggtcaccatacttcgtccaatttgcccggcttccattcgaatgcggatcacggcgcgaagctggggtacaccgtcgtcaacacggtcggcgaccagaccaccgagaccccgggttccgtggagtacccccaccccgtcctgcaggtaaagaccggcaagatccaggtgaccaaggactggtccgatggagcggagaagcatgggaatggctcggtgaccgtcacgttgaagcagtgcaatgcgcaaggtgaggattgcaaggacgtcaaccggaccgtgaccctcaacaaccaaggtcagtgggctggcgcgttcaagaacctcgcccctggcacctaccgcgtggaggagtccagagtggacggctacacggcgtcctacaaccccgagaaccagttggtaaccgtcactgccgacgacctgtgggcggctccggataacaacaacatgacgaccttcgacaacgtcaagacgtacccggtcacgatcaccaacaccttcgttgccgtgtccgctctgccgatgaccggcggtgccacgactcgtgactggcttgtgtatgggggcggcttcggcctgctcgcggcactggtcagaatcggatacttcatctggcgcaagcgtcggctcgtctgacctgcggcggatgctccgccctcctccctcgtcggggagggcacacgggggcggcgaccagtcgcccccgacaactcaagatttgcggactgcggaagcctcaacgactgccgcttccgcagttgcaataaacaaaacaacgaaaggaagaggagtttctcatgaagttcaagaagcttttcgcgggtgttgcagctgcggccacccttctcgccggcatggcgttcggcaccggtgccgccaacgcggccgagacgacagtggacactgctgcaacagtcacgttcaaagcgtccaaagaaaagcagctgaccagcgcccagctgagcgcatacaagatcgcggactacgtgaactatggcactgccgaaaacccggtgtatggtgtgaagaccgctgcgggcgccgatcgcgcgaagctggctgcggctctgaccaccgccggcttccggaacgtgccgaccgatggcaccactgatttgatggcttgggctatgaatcaaaaagcgaccacgggtacggatggtaacgtcacgcaggttcagttcgatcagtccgagacccgtccgtggaataatccgtccgtgacgcgtaagttcgcggatgcgctgcaggccgacaacccgttcaccgccaccgcggattcgttcgtgctgaacaaggcgactggcagcgacacggatggttggaccgccacgaacaagaccgcgctgactgctggcgtgtatctgttcctggacggcaacgcatcgaccgataccctgactcaggccgtcccgatgatcgtgagcaccggctccgttaacgctgagggcgttctgtcgcttggtgatagcaccgcagaagtggacatgaagagcacggtgagcggcaccaagacgaagtccaccaccgccaagagcgcgtccgtgggcgaaaccgtgccgtttgaactgggctacacgattccgaatccggtcccgaccggcttcaccctgcagttcagagatgtgccaagcaagggcctgaccgtcgacttcgccagcctgaccgttaaggccggcgataaggtgctgactggcaccgattacacggtggagaacaacctgactgacaacaagggcgacggcaccaatactttcgtggtgaagatcaccgacccggccaagtacgccggcaagcagatcaccatcacctacaacgccaccgtcaatgacgaggccgagacagtcaagggccaggattaccacgcggtgaccaacaagctcgtcgacaatgatggcacccccatccccggcactgaaaccctcaccaagatcttcggcttcaagttcacgaaggccaacgcccagggtgaggccgtcgagggcgcgaagttcacgctgagtgtcgcaaaagaccagaacggcgtgctgccgaacagcgataagtacccgctcgaagtcacgtccggtgccaacggcgtcgtcaagttcgacggcctgaaggccggcagctacaccgtgaccgagaccgcggtcgccgacggataccaggacttcaaggcctcgttcaccgtggccatcgaggaaaacggcaacgtcaccttcgccggcaccgactcctggggtctcgcgcccaaggacagcgccgccgactacaaggtgaccaacgtcaagtccgtcttcgaactgccgaagaccggtgctgcgggcatcgcgctgttcgtggtgatcgccgcgctgctcggcggcgctgccgccaccgtgtacgccaagtctcgccgcaccagccgtgcgctgcgctgactgacacgataacaggccaagccgccgcatgacgtgcatcccgcacgagcatggtggcggcttcggcttgctgtaaccattcgccccccccggcagcacccctgccgggggcaacacagtgcatacacgaattcgtttcacggcgattgcagtgacggccggcacaacaacaggaggatgcgcatggcatcgaggagacacggatcgaaacggccggccacctcatccggcaacgacccagccgtcaaatcctcccatgcgcccgcacggtcaacgatgacccgcagcctgccggacaatgacgggcgatcctcgaataattcccgcaaatcctgccgaaacagccgtcacaaacccgccgtgcagccgcagctcccgtactcgatgctgagcttcaatcaggcgaccgacatctccgaccttgtcgcgcaacgcaaacgactgcgcatacagctcatcatcatgcgcatcgtcacgctgatactggtcatagccgctgtcgccgtcgccggatatcccctagcgctccaataccagagctcgctcaaactcgcccaaacctcacgcaacagcgcacagcaggtcgccggctggccatacccgcaagccgaagacgccctcgccgccgcccgcgcatacaacgcaaaactcgccagatccggtcaacccgtgctgggcgaggccatcgacccgttcagcgccgcacaaggcgggtcgagagccaaaggcgaggactccgccgcctccaaagacaaggaataccagtccctgctcgactcgggcgacgaagtgatgggaaccatcaagatcccgaaaatctccgtcaacctgccgatctaccacggcacgtcacagaccgcgctggcctccggtgccggtcacctgtacggctcctcgctgccggtcggcggggacggcacgcactccgtcatcaccgggcaccgcggtctcgtcaacgcgatgatgttcacgcggctcgacgagatgaaaaccggcgacttcttctacatcgaagtgatgggggagacgctcggctacgaggtcgaccgcatcaccgtcatcaacccggacgacacgtcgcaactcaagatcgtgcccggcgaggaccgagtgacgctgatgacgtgcacgccgtacggcgtcaacacgcagcgcctgctgatatccgggcaccgcgagccgatcccgatgccggcgccggacccgtccgacctgcatgacacgcgcaccatcgtgacgatggtggtggtgtgcggtctgctcggcggatggctgctgctcggcgtgatcgggcggattcgccggctgccgttcaagccgatgcggcacgcgtcgtcgtggccgcggcgcatgcgtgggtgaggtgcgccgggttcacgggggggggtgtcggcggcgtcgccggtgaggtcctcgaaggcggacttgcaaggttttcgagggatctcgccgtgcgaatcgaacttgccgtgagatgaacatgaacttccggtcaataccgtgcatgtcacggaaagtgagtgtacgctgaggattagccgatcaggtgcatacagcgttgcatgtggccggttgcggtaacaatgatttgacccggtcaacggggctctctgcaaaagggggacatatgagcaacacgtatccagatggagcgccgcagactccgtatggtgatccgaacaatgcttcgggcgcggaaggcgcgcccgaaccgcagccaacgcaggctttcccgccggtgccggtcgttcctctgcccgggcagggagcgggcgcgccgacgggagccccagccgccccgtacgggcagggcggggccccttatggtggtgcgccgactgccgcgtacggcgagtcgctcgccgggccgcagggcggcgccgagccgtatggataccaggcggcgccgtatgggcaggaaccgggagcgtacggacagtcgggcgctggctccgcatacaaccagggtggggctccttatggtcagcagcctgaacccggtccgaaccccttcagccagcccgatggcggaactccgtatggtggcgaggcgcctaccgccgcgtatggtgagccgcttgccggcgatgctccgggagggtacggtcagccggccgcaccgtacggcggcgagcagccgaccgccgcatatggacagccatacggcgccaaccagtacggtgacccgcaatacgggaaccagccgcccgcaatcgcgccgcaaggctacggcaatccgtaccagcaggaaccgccgaagaagaagagccgcggcccgctcatcgccggcatcaccgccggtgtcgttgccgtcatcgccatcatcgtcgtagtcgtgctgttcgccaccggtgtcatcggcggcaagaaggacagcagcgccgacgcgaaacccaacacgtccaccagccagacgcagggcgacagcaaatccaatggcgacaactccagcaacggcaactccgacggatccagcagcaacgatctgaacaaccttgacgacgcgttgcagaacggggccgacgacaccaacaacgatctcaacaacgacagctccaacggatcctccagctccggcaagccgtcactggaagagttcgtcaactccagcgaaatccagtcgcagctcgacagcatgacctcgtcgtaccagggcatgggcatcagcatcaaggcgtacgcggaaggcaacacgctcgtgtacgactacacgctgtccgacacgtacagcagcatgggcgacatgatgacgtcgagccttgacgggatggacagcacgttcaagtcggtggcgcagacgctcaacgaaacctgcgacaccggcggcaacgccaaggtgcgcgtgtacctgcataccgaaagcggcaagacgctgttcgacaagagctacacggagtaagcgggtccagctcgcgagaatccgacaaggcgggacggtcatgattggccgccccgcctttcgtatgcgcgttcttcgtaaggattgcactcgcactggtttacactggtgagtatgagaatcgcacgtttttcactcaacgacaagccgcgctatgccttcgtccagcaggacccggccgacggcaaggactacctgatcgaactggacggatacccgttcggagccgcgcccgtcaagcccacaggggagcggtacgcgctcgacgccgatgggctgaggctgctcgcgccggtgattccctccaaggtgtacggtctcgccaagaactacgaggcgcacgcgcagttcatgcacgagagcgggcactccgagattgctcacgcgccggaagacatggtgatcttctcgaagccttccacgtcggtgatcgggccggacgatccgatcgtcatcccgtcgtattcgaatgatatgaacttcgagcccgaagtggcggtgattatggggcgtatcgccaagaacgtgccggtcgagaaggccatggactacgtgctgggcttcacgtgcgtcaacgacgtgacgctgcgtgacctgcaggggctggatccgatgtggacgcgggcgaagggcttcgacacgtcctgccctctcggcccgtggattcagaccgagctggactggaaggacgcgaagatctccttcacgctcaacggcgaggacgtgccgatggcaagcggcaccactgcgaacctgattcacggcatccccgagcagatcgccgcgatttcctcgttctcgaccctgctgcccggtgacgtcatcatgaccggcaccccgaatgcctccggtcacctcgatcccggcgacgagcccatcgtccacgtagccggcatcggttccctccgcaacgtggtcgtgcgcggctaggcgacagcacagtgtgctgtcgcagcgcacgagccgggcgacagcgaggccagattgggtcggccgcaggccgtccgaaattgcgggaccgtgcgcggcattgcccgtagcctcgaccgggacgttgatgattggctcggggaatccataccgtttgagcagcaggcgcaagtgggtctcggccggggagtcggtgttctcgcgaatctgggtgagtgccctgatgcattgtttttgcccctggaacgagtcgcatgggtggatgaattttctgagttcggccagagtggtccgtctgcgtgcggggtcgcggcataccagcgagtcgccgaattctatgaggtcttcgagggacagctcttcggtcgtttgggcgaacagcgcctcgggggaggtgcataggagcccatgcacctcgatggttgcgcccgaggcgtccgtattgggccatacgcggggaatgatgtctttcgcgcgcgtccgccgcgtggttttgaacgtgacagtcgcggcggggcggttcttcgttgatctcaaacatgaccactctcaaaactcgcagatacgagaactgttttggcggaaaatggcggtttcgggtttcgtatctgcgagttttgagagcgtgtcgcacggattcgagttatccacattgcgttttggcgcttcaaaaacagcgcaaaacttgagtcgcttgcgctcaactttcgggaatagaatgggtgctgaatcggttgtgcatatcagacacagacggaaagcgctgtgcggggcggttcggatgtcgtgggccgcggccgccaaggcgcatgagacatacggaggttgatatggaacagaagttcaccaccatggcccaggaagtcatcggtgatgcgattcagagcgcgtctgccgcgggcaacgcgcaggtcgagacactgcacgtgatggatgcgctgctgcgtcaggaaaacggcgtgattcagggactgattcaggcggcgggcggcaacccgcaggcgattggcgccgcggtgcgcaatgctctggtcaagatgccggcggcgagcgggtccaccacatcgcagccgcaggcgagccgccagctgacggcggcgctggcacaggccgagaaggagatgcagcagatgggcgacgagtacgtctccaccgagcacttgctcatcggcatcgccgcatccgcgccgaaccagagcgcggacatcctcaaggcgaacggcgtcacggccgcggcgctgcgcaaggccgtccccggcgtgcgcggcggcgccaaggtcaccagcccggacgctgagggcagctacaaggcgttggagaagtactccaccgatctgaccgcccgcgccaaggagggtaagctcgacccggtgatcgggcgtgatcaggagatccgccgtgtgatccagatcctgagccgccgcaccaagaacaacccggtgctgatcggcgagcccggcgtcggcaagaccgccgtcgtggagggcctcgcccaacgtatcgtggccggcgatgtgccgaccacgctgcagaacaagaagctcatcagcctcgatttggggtcgatggttgccggctcgaagtaccgtggcgagttcgaggagcgcctcaagagcgtgctcaacgaaatcaagaacgccgacggccagatcatcacgttcatcgacgagattcatacgatcgtcggcgctggcgcggccgaaggctcgatggatgccggcaacatgctcaagcccatgctggcgcgcggcgagcttcgcctgatcggcgcgaccacgctggacgagtaccgcgagaacatcgagaaggacccggcgcttgagcgtcgtttccagcaggtgttcgtgggcgagccgagcgtggaggacacgatcgcgattctgcgtggcctgaagcagcgttacgaggcgcaccacaaggtgacgatcggcgacgacgcgctggtcgccgccgcgacgctctcgaaccgctatatctccggccgtcagctgcccgacaaggccatcgatctggtcgatgaggcggcagcgcacctgcgcatggagctcgactcctccccggaggagatcgacgagctgcagcgcaaggtcacgcgctacgagatggaggagatgcagctcaagaaggccgaggatccggctagcaaggagcgcttggagaagctgcagaacgagctcgcgaacactcgcgagaagctgagcggcctcaaggcccgctgggatgcggagaaggccggccacaacaaggtcggcgacctgcgcgcccagctggacgccaagcgcgtcgaggctgacaagttcacccgtgagggcaacctggccgaggcgtcgaagatcctgtacggcgagattccggcgattcagaagcagctggacgcggccgagaaggccgatgcggaagagggcgcgacgggcgagaccaagcccgagccgatggtgcccgaccatgtggacgccgattcggtggccggcatcgtctccgagtggaccggcatccccgtcggtcgcctgatgcagggcgagaacgagaagctgctgagcatggaggactacctcggcaagcgcgtgatcggccagaaggaagcgatcgcggcggtgagcgacgcggtgcgtcgttcgcgcgccggcatcagcgacccgaaccgtccgaccggctcgttcctgttcctcggccccaccggcgtgggcaagaccgagcttgccaaggcgctcgccgacttcctgttcgacgacgagaaggccatggtccgcatcgatatgtcggagtacatggagaaggcgtctgtgagccgtctgatcggcgccgcgcccggctacatcggctatgaggaaggcggccagctgaccgaggccgtgcgtcgtcgtccgtactcggtggtgctgttcgacgaagtcgagaaagctaaccccgaagtcttcgacgtgctgctacaggtgctggacgacgggcgtctgaccgacggccaaggccggactgtggacttcaagaacacgatcctgatcatgacctcgaacctcggctcgcagttcctggtgaaccaggacatggacgcggacgccaagaagaaggccgtgatggacgcggtgcacatgaacttcaagccggagttcctgaaccgtctggacgagatcgtgatgttccatccgctgacccgtgaggagctgggcggcatcgtcaacatccaggtcgctcaggtggcctcgcgtctgacggatcgccgcatcaagctcgacgtcaccgacgcggctcgcgaatggctcgccaacaccggctatgacccggcgtacggcgctcgtccgctgcgccgtctggtgcagaccgaggtcggcgaccagctggcgcgcatgctgctcgccggcaaggtacacgacggcgacaccgtgctcgtcgaccagaccggtggcgagcatctggaactcggtaccatgcccgaggatccggatgccggctccgataccgacgtcacggtcgaagacgtcaccgaagccaaatgatggccgggtgatggccgcataatggccgagtcgcgatgaggggaggccgggctcaatacccggtctcccctcaatgcgtcataagtgcgtcacgctgtgcgggtcgcgtcacgcggcgagcgctcgcacagcgtgacggttcgtgagaagccttatttttcaacgtttttggagtatgcgtcactctgtgcgttcgctctgcgtgacgtgacccgcacagcgtgacgctgcatggtgcgtgtgtaggcgctgtggtgcccggattcgcgcgtaagtccgaacgcgccgcgacccctattcgccgaccgcggcgcgctgctccacgaactcgcatccagctatcgcgcgggccatggcgtcgcgcatggtggacaggaacacgccgtcgcgcgtgaacgccagcacctgcacctcgatgccgtacggcgaaaaaccggtgagcttgacgagtggttcactgccgggttgcgcgaattcggcggtggccgtggccaccgcgcgcttcactgcctccgtcacgtgcgccgggtcgctgccggccttcgcggtgaacgtcatcgtcacgcatccttcattggacggcgtgagcttctccagcgacgcggtgttgagcacggaattgggtatgaccatctcgttgccattgcgctcgcgcaccaccgtctgccgccacgtgatgtccttgaccacgccggccgtccctgcgaccgacaccagatcgcccggctgtatcaccttgccgagcatcagcccgaagcccgagatcacgttcgccacggtgtctttcagacccagcgacacggcgatgccgccgacgccgagcgcggtcatcagtgttgtcgggctgatgccgaacaccggctgcagcacgatggacgcggccagtatccacaccagcacgcgcatgatgttgatgaatatcgacgcgctcggcatgtccgtccgatccagcaccttgcgcatcacccgtgccagtcccttggtgatcaacagcgcggcgacgatcgccaccagcaggaagatgattttcccggcgttcgcctcgaaccattgcagtatctgatccatgtcgcctccagggtcgcgtccgcgtcgcgcaccccgcggcggcgactgctctgcaagccactttagtgggcggttttgaaatctcctggaatgtcgcctttgaaaatgcggctccagtaggccagcatgttctccttcgacatcgacaggtacactcccatggcgagcacggcgacatcctcgttgagcaggtcgtcgaccgagagtttcttgctcagctccggccaccgccgcagcaccgcgaggataccgccgacggtgaagtcgagcatcaggtcggttttcagatccaggttgtcggcgtcgagctggaggtcgttgatgatcatcagacggccgaagtccttcagcgactcgatgagctcgggcgagctatggctgccggcgagcagtgccagacggtcgagccgctgccgctgaactgggtcgttcatcaccagggagcattggcgcctccattcgatgtcgggattgaggtcggcgcgtggcgcctgcacggtcgagtgctccacggcgtgcatgatcgccgaatcggccagctccggcaggctggcgtaatggtagtagaacgagttgcggttgacatgcgcctcgcgtacgacttcggtgacggtgatcttgcggtattcgtggtctgcgagcagctcccagaacgcgttttcgaggcgttcggtcgcggagagtatctcggaatccttgcgtgggcgcggcatgatggttcccttcctgcgtgacgtgcggctatcgtttattgggcactatgtctatatgtgtgatatggattattgtagggcggattgtgaggcggatgatcggaaaataggcgaactgtccatttttctcggttggcgaaacagagttcgggcacgagacggctaccgcgaggaacgggaccggaccgcggccatgagcagccccatcgcctcgatcagatgacggcgatccgcctccgacagacccacgaacgtgttgatcatcgtgggaacggccttcaggccggccgccatgagatcggaaatgctgtcggcatggctcgaccgcagcacggagaacagggcgtccaccgcgcgctcgcggtcctcggtgctcagcgattccagccagccgttcaacgaccggttgaacagctgggaactcggcgacacctgcggcagatattcgaaatcattgcccgagacctgccaggagaacgtcagatgctgcatcacgcccttctgatcggagcgtacaacccgcatcggctcgggcgtctccagaatcatgccgacaatcgaggagtccggtacgatcttcacgatgaggggcatgacgctccgatacggatcgctgccgacgatctgcgacgggaaccccggcccgtccagcgaatacaccgccgtgacacgccgctgcaccggctcgggcgcgttcatcgccgcatacacggccagattgccgcccttggaatgccccagcagcaccatcgggccgcgccacaggcgcgccacggcgcacacatactcacacgccgcatgctgtgcgggcaccgggtagcgaaacgccatgttgaaatcctctttccaacccacgaacgagtcgtccgtgccgcggaacgccaccgccagcgtgccgcccggcagcagcatggtcacggcggcgaactgcatctgctgttcctcgctgaaatgctcatcggatgcgtccacgcgaacgcaggcaaagcgcggattgactccgatggcggcgtacagctcctgcgtcaggcgcgggtcggcgaggccgttatggccgctctccacatgaaaatcatcgggggtcagcgcctccgacaccgaagccagcgttgcgtcgccgaactccggggcggccaaatggcgaatcgagcgcaccggatggcgcacgtcgatgctgctcagacgtctgcggaatgtgccggatcgtgcctcgacatcggccagagtccgcacacatgccggcatgtcctgatagacaagcgacgccagcaccagcgcgtcgacggcgttgaacggtgcgtcgacgccgaacgggcgggtctcggaacgtgcataatcgatgatgttgggcgtcgtgtgcctcctttccgccgcggcggggctatgcttgtcgtccggagccgctaagggccgggcgggtgaccggttacccgtcaatatacccggttcccaacccgcgcgaacccaacaacaaccggcgacatgccctgttgtgcgtggtcggtggtaaaaacgaaaccagagtccaacggggaggttgtgccatgatcaacgaaacatacaaagccatgctcggcggcaaatcggtcattcgaaccctgagtgaatacgcgaccgcaaggggcaccgaaatcggatacgacaacgtgttcgactattcgctgggcaacccgagcgtgccgtgcccgtccagcttcaccaaggcgatgatcgacatgtacgagaccgccgatccggtcgcgctccacggatacagcccgtcgctgggcaacccggaggcgtgccgcaccatcgccgaaagcctcaacaggcgtttcggcatggattacacggccggccacatcttcccgacgacgggtgccgccggtgcactcgcccacgcgctgcgggccgtcaccaagcccggcgacgaagtgctcacgttcgcgccatacttccccgaataccatccgtatgtcgaaggcgcgggcgcacggctgaccgtcgtgcccgccgacatcgagagcttccagatcaacttcgcggcgttcgaggcggcgctgaaccccgaggtggcggtcgtgctcatcaacacgccgaacaatccctccggcgcggtgtattcggccgaaacgctcgaccggctcgcgggtatcctgcgggcgaagcaggccgaatacggtcacgacatcttcctgatcagcgacgaaccctaccgcgagatcgtgttcgacggcggcacgcagccgtacccggccaagttctacgacaacacgctgacctgctactcctggtcgaagtcgctgagcctgccgggcgagcgcatcggctacgtggcagtcaacccgcgggcgaccgacgccgaactcatcgtgccgatgtgcgggcagatctcacgcggcaccggccacaactgcccgagctccagcatgcagctcgccgtggcgaagatcatcgacgagaccagcgacctgagcgtgtacgagacgaacatgaacctgctgtacgatgcgctgacctcgatcggcttcgacgtggtgcgcccgggcggaacgttctacatcttcccgaaggcgctggaagccgacgcgaacgccttctgcatgaaggccaaggaatacgacctgatcctggtgccgtccgacagcttcggcgtgtccgggtacttccgcatggcctactgcatcgacaccgacaaggtgaagcggtcgattccggtgctggagcgcttcgtgcgcgaggaatacggattgtaggcgaaaccgcgctctcaaaactcgcagatacagccccaaaatgtcgattctggggctgtatctgcgagttttgagggcgcgttccgtctaagagcatccagaaagcatcagaaaacattcggaaaccgttccgcaaggttgcaggacggttcaacgtcaggcgcaggggccgctaggaaagccgtcgttcaatggagtcaatccaaggaaaggacgacgaccatgcaaccccatgacatgcaaccccatgcgagccccggcggctcgcggcggcgtcgaccgccggtaatcgcgacgaggcggatggtcgccctcacgggtggcctgtgcgcgggcgccggcggcatggtgctgattcggcacctctcggccggttctgctggctccgcctcaaccatgcagccgccgaacggcaacttcggtggcggcgccaacaccatgcaatacgactattccggcagctactcggtgtcgctcaccgtcggcgaagactccaccaccgtcatcgacggtaccgacatcaccgcctccagctccgggtcgaacggcgtcttcgccaccgattccggaacggcgctcgtcaacgacacatcgattgagaccatggccgacaattcacgcgggctggacgcgacctacggcggcacgatattggcgaacaagatcaccgcggacacgcagggcggccacagcgccatcgtcgccaccgatcgaggcggcggatcgatctctctcgccgatgcgacgctgagcaccgccggctccggctccccgctgctgtattccaccggcgacattcaggtgaacaacgtctccggaacctcatccggcagccagatcgccggcatggaaggcctcaatacgatcctgatcaaggattcgacgttggaaagcacggtcaccggcaaaaccgcatccgacccgatcgccaatggcaccatcatctaccagtccacctcgggcgatgcggaagccagcaccggcgagcacgccacgttccagtcggtcgattccacactcagctccgccatcggatcagggtcgatgttctacttcaccaacacgaccgccgatgtggtgctgcagaacactgagcttgatttcgacaccgacgcggcgacgctcacggacaacgcggcggccggctccggcacgggcacggcgagcgacgcccccatcactgtgaatgtcgacggcacgtccacgtgggtggtgacgaaggatacgaccatttccgcgctcaacgtcgcttccggcggcgacggcaacaccgtcaccatcgtggcgaacggcaagaccgtggtctccggcagcggcgacgtgaccgtcacggtgaccggctcgtattcgacctcggtctcggccgggagcgacacggagctgtcgagcgacaccatcgaccgcagcgagttcgacagccggttcggcacatcgacagcgtggacgatggcataaccatggcggcgtgccagacatcaacatcagcaatcacttcatcagtcagttttcaaaggagtcatcatgaccagcaacaacagcaacaatgtcaacaatgcgaatggcggcgagagcggcaacggcgcggatggtgccatcgagggcgtcgctatcgaggcggcggcgaacttcaccggttcggagcagcgtcaagcggctgtgaatgacgccgctgtggctaacggttcggcgggcggctggggcgtggagcccggttccgcggctggtcgggccgatggtggccgggctgcggcagacaacggcggtacagacgagtatgcggggaatcgtgcggctggtctgggagacgccgaatgggctgccgggaccggggctgctggatgcggaaccgccggatatggctcggctgggtataggctcgcggcagctccgggcagttccggctatgctccgaatggtccgatgccggggagctacggcgagggatcgcgtgcggcgtggtacgcgcagaatgcgccgacgcaggcaatgaatccgcagccgggaaatatgcaagcggtgagtggccagaacatgaacgcgcagggcgcgaacgtgcgaggcgcgaatacaccagatgcgaacgcgcagggcggccggatgccgttgtgtgcggattggaacggccgggggccgatgcctggagcaatgggcggtcaggtcccgacaccgaaaggctcgaagggcggcgaacacgcgttgagcggtaagacgtgggcattgctcgccgtggtgtctctggtctgcggcctcgtgggcggcgtcggtggagcgctcgcggtgaacgcgctgaccgacgacgaagatggcacaggcagcagccagcagatgcagatgcccggaggcatggggcagccgcccagcggcggccaattcggcaataggcagtttcagcagtatggcggctcagggaagtcggacagccagctcggcagtggttccagtggctccggcagcagctccagcggttccggttcctcgtacagctccgacggcagtgatgcgaccacaatgtaagccatgagccgggcaaggctcagcgcgaagtgaaagcgtccaaccgcaatcgctgccccctatctgcccccatcatcctcgtcaaattacgggttgaaatagccgttctgggcaattccccgtgcgaaatcgccgttttgagctcgaaaaacggcgatttcgcacggggaattgtggatctcggctatttcaacccgtattttcgcgttctgttcgccctccacagcccgtaaatggcccagccggtcgggctttacggctcatccggccagcgcatcgctgacgaatcggtcgaccgtcgaccaatgcggcccttgcctcctcggctgcatcacggcgcgcgccctccagcttggcgccgggaaccttaccggccctgaccagtttcatcatcgaaagcggcgcctgcgtgtcaaggacgaatcggaacatgaacgccgacgtggccagcgtcaacgcgcctgcggacgccgcggcgatgccggtaattcggcatccgcgccgtacccggccggcgcgtcgcgagcgaaatgagtcatgccgatgcgtgaaagcagccggcgcaaacgcagcgcagcttcccctgcggataccctgtgccgactggattccaagccggctgcacggcccaagcgcggccggcatgcccgggaagagcgcgaaaggcgaaaaatcctcacgacctctagcgaaccgcgcgaacggttgttagtgttgatgcacagacgatttcggttgccgcggcaggcgtgccgtcggctgattgacgcggcgcgccgaacgccgcatataccgcttggtgcgcaccagacgtagagcggcggtctccaaaaccgcaggtcgttggttcgcagccaaccgcgtatgccagtcacttgttttttcggggtctgcctccgccgacgccccgaccgggacgcttcgcgttccatccgtctatcgtctccgggagccagccgcgcgtgcggcctatcatggcgtcgggttcggggagcttgaggttgagcaggccgccactggttatgccgaggcgttcggtgacctgcttgacgccgagagatatgcaacccgagaacacgcgacacgcagcgaatcttaacgaccgcaggactagacaaacaacaaatggcactacgcagatgctcatacacccgctgccgcctgcccgtcacccgcggccaagcgtgggacctcggacataacgaccggcgcgacggatacaacggacccgaacacgcgagctgcaaccgcaaagcgggagcagccaacagcaaccgcatgcgcgaacactggaacaagcaaacaggaaacaacgtggcgactgcaggccgggtgagcctacttcttcttcggcacgtagatcacagtgtcgatcagttctcggtagtgcgcgacgatctgcgcgcggcgggtcttcaggctggccgtcagcatgccgttgtcttgtgtgaactcgtcgggcagaatctcgaacttgcggatcgactcggcgcgagacacgccctcattggcctgattcaccgcacgctcgacttcggtgtgcacgatcggattgcgggccagcgacgccaggtcggactcctcctgagcgccctgcgatttcagccacgcgttcgcatcggcgagatccaatgtgaccagcgcggccacgaacggcttccggtcgccgatgaccaggcactggttcacaaccggcgatgtcatcacggcggcctccaacaggccgggggagacgttcttgccaccggcggtgatgatcagatccttcttgcggccggtgatcgaaatgaagccgtcttcgtcgatgtcgcccagatcgccggtgtgcagccagccgtcgacgatctgctcggcggtcacatcgggatggttgtggtatccgcggcagaccagatggccgcgtacgcacagttcgccgtcgtccgcgatacccgcggtgacgccgctcatcggcatgccgatcgtgccgatccgattgttctccggcaggctcacgcacaccggcccgcaggtctccgtcatgccgtagccctcaagcagcggcatgccgatgccgttgaagaagtgcgaaaggttggcgtccatcggggcgccgccggtgatggcgaagtcggcgttcgggccgaaaatcgtgcggatcttcttgtacaccaccaactcgtagaacccgtgggcgaggcgcccccgccacggcagtttctcaccggcctgctcggccttcgaccaatcccgcgccacgtccgccgcacgcaggaacatcttgccggcgatgcccttgccggcgcgctgcgacgctgcgttatacaccttctcgaacacgcgaggcaccgccagcagcagcgtcgggccgaacgactcgaaatccttgacgatcgtcttcatgtcggaactcagtcccaacgtcagcgtgccgcagaagctcagcagctccatgaaccgcgcgaacacgtggctcagcggcaggaacagcagcagacggcggtcgggccacgcgcaggcgcggggcatgtactgcatggccgacaggcacaggaacgccagattgcggtgcgacagctccacgcccttgggggtgccggtggagccggacgtgtagacgatcgtcgcgaggtcgtcgccgtgggcgtcgttcttgcgcgcccagaactcctcgtcgctcacttccttgccatacgcctgcaaggcttcgagcgcgccggcctcgatcacgaacaccttgcgcagcgaccgcacctcatcgtggatggattcgatcttgtcgcgctgcccgtcgtcctcggcgaacgcgatcgtggcctgcgaatcgttgaagatccagctcacctgagcgtcggaattcgtctcgtagaccgggacggtgagcgccccgaccgccatgatggccatgtcgagcgcggtccattcccagcgcgtacgcgacacgattgacacggcgtcgcccttcttcacacccaagccgatcagacccttgcccagggcgatcaccaggtcgcggaactgcgtcgcggagaacgacttccagccgccgtccgccttgtattcgacggtcgagccgtccgggtcgcgctgggcgcggcggtcaaggaaatcaaacaggttgatatcgtcgtcgatcggttccttcagcggattggtgaactctttgaccatggtcgaggaatttactgtcatactctcttgaatactctcagcgcggtacaaaaaccgcgcgacaggcggcattcggggggggggcgggggggagcgagcatgcggcgcgatgatgtcgcattatgtgcgtcgcgcgtggccggggctgtacgatggaggcaggtttgccagtatcgcgccttcggtggcgcggcgcggtgattcgtggccgatgaaggtgacgggcggaataggcgaggcgcgggcgagatgcaggcgagcggcatgagccggagcgaagcggcccgagccggacgagagcaatcatgaacatgccgccgggctggtatccggacccatcgggcgatccctcgctgatgcgttggtgggatggcgaggaatggaccggtgatttcgcgccggcgcagcaggtgacgccggacggcaaccgtattcgccgggcgcgtacccgatgacgaatggcgaccgcaacctacgtctcgctgcattcatcctcaacatcatctcgatggtcgcgttgggatggacgttgctcccgctggcatggatgagcccgatgacggtgatgagttggggcatctacaagggcacgcgggccaacaccgtggcgttcggtgtgtgcaacctgctgttcatgaatgccattttttttggggggggggctgcccgtcagcaacaaagagcggtgaccgattccgcggaatttcaggcgtgtcgcgatttttgtcccgtttgtacaggcggtcgggtaatgtattcccctgttgcctgtcaaggtgacattgcggacatagcttagttggtaaagcgcaaccttgccaaggttgagaccgcgggtccgagtcccgttgtccgctcgcagattcggctggctgaagcgattcggccggtcggcacgcagacccgggcggttggcgcagaggtagcgcacttccctgacacggaaggggtcacaagttcgaatcttgtatcgcccacggatgccgaagttcacttcggtgtgcactgggtgattggcgcagcggctagcgcacttccttcacacggaaggggtcgtaggttcgattcctacatcacccacggccgctacggtggtcggttttcggggctatggcgcagctggtagcgcatctccatggcatggagagggtcaggggttcgaatccccttagctccacagaacagaacgcccctccttccgggaggggtgtctctttttttcgagcctataatcgcaggcgaggatcctcggcatcgacagttccccggacatgatcgcctcggcgcgcaagctccgccccgactgcgatttcgatgtgctggacgccgggtcgctcgacgagctcgacaccgatttcgatgtagtcttctccaacgcctgcctgcaatgggtgccgaatcatgaacgggtgctgccctccatgctgtgacggcttaacgccggcgcaattcaccgagaacatcaacctgccgccgcacatcatcatgcgcgagaccgcgtgcgagccgaaatggcggcagtggatcagcgagatacgccgctactacaatctcggcggcgacaatttcgacgtaagcgcatactatgatctgctcgccccgctctccgcgcacgtcgacgtgtgggagacgaactactaccatgcgctgcctgggtatgaggcgatcctcgactggtatcgcggtaccggtctgcgcccgtatctggcccagctgcccgatgacggactgtatctgcgagttttgagagcgtcggttgagcgagccatagatttttcatatgcccgcggtcttgtgtcgcgccctgcgacgtgcttcgatggtgggtgccggcggcaaggggcttcgccggtgccatatcgatggttcgcacgtcaagaagggggttgtgatggtgtccaccacattggacttcgccgagaagtacctgctgaaaaccgaggtcaggaccgtcgcggtcatgcccgacgacgatgattcggtgcgtgatgatgattcgtacgacgcatagtgcggtgatcgttctcgatgatgtttgtgcgaggatgactcatattcccgcacaagtgcgcatgatgcggattcccggaatcccgagacttgctttcgcttgatgcccgattggcccggtatcatactcgcgcctgtatcattgaggacgattcgttgcatatcttgccaccgggaagggtcatcatgggacgcagtcggtgatgcatttccacgtgcacttaatcccgcacagatatggggacggattggacacctggcccaagctgccgggccgctcgctcgacctcgatacggcatggcggcggttgaggcggggaaaatcgacttcgtgaggattgtgatataggacatcaaaacggcgggattccgccgatgcaacctgtggttgcgcacggttgcggggcatggtcggcgattgcaaccgtaagatggtggcggatggcgtggacggcgtgccatagtggggtcatcggccgaacatgacatgatggaatcacttgagaagggatttgacgatgagcttccgcaccaacctgcaatacctgcgcgcccaacgcaacatgacccaggagcgactggccatgctgctcggcgtctcgcggcaggctatttcgaaatgggaatccgagaaggcctaccccgaaatggacaagctgctcatgatctgcgatctgtttggctgcacgctcgacgacctcgtgctcggcgatgtgagcgtgagcaccagccggccggactcgcacggcgcatcggcaacaggctgcggtacgactgtcggaggcaggaccggtgaagatgccgggagccctgcacatgcggggaacgcgaagggaagtatcggcgacgccgacgagcccgcgcatctcggtgcggccggtgccatcgagccaagcctcacgggcgtgccgaccggcgagacaccgtacggaaccggttcgccccgccccgccgtgcacgccaatacggccaccctgccgcaggacctgaccggctacgacgagcatcgccgccggttcgcgctgctcatctccggcggcgttgcggcgatcatcgcggcggtcggtatctgcaatctgttcgattcaagcaactccatcctcggcgtgacgcggctcaatgacttcctcacgttcctgtgcatctgcataggtgtgatcgccgggctggcgatgctggtcccgggcggcatgtcgcacgccgagttcaaacgccgccatccgtatatcgaggatttctacaccgatgaggatcgcagccgcgagacgcgtctgctggtggtcggcatcgtgggcggtatagcggcaatcctgatcggcatagcggtgactgtgtacgccgatgacgtgttgggcatcagcgatggatggccgaacgcgatcatgctgatgctgtactcggtcgccgtcttcagtttcgtttactgcggaatacggcacggcatgctcgacatcgacggctacaacaagaaggccgataccgatggcaagaaagagcgtgcagccgggcatgatttctacgacaatctgaccggtgcggtatgcggcatcatcatgtcgctggccacgataaccgccctgtgcctactgtttctggggccgtggatgctgcatgacgactggagctccgtgggcctgttctggctgccgtggccgatcggcggcgtgctgtgcggcatagcgagcctcatcatccagctggtcaaggattatcgcaggcgcaacgacgacggacaaggcgccgggcagcccgggcggacgaaatagcaaggaaaggacggccgatggatgatctcgccgcgtctcgtgagcggtatccgttgcaaaccatgcgattgccggatggcgaacccttcgcataccggtatcatcgcaatccctccgcccgcgcaacgattgtgctcctgccgggcggaatcgggctgtccgactgttctgcctgcattttgaacggttcgtcgaggaccgctcggtcatcaccttcgattatcaggagcggttcgcgacgaacgccgaactggcgcgtgccatcgcaagtggaagcggacgcttcgcctgatatcgatgccgctgcaccggcgtctgatggcgtgggccgtgatgcgcaagacgcaagacctgtcgtctggcgaacggcggctgatgcagggcctgtgcgatgtcctcaagcagttgctgagcaagccgtatcagcggcatatggccgatttgctgatcgatgctgcgtcgcacgccgacatggtgacggcggtcatctcgcgctgttggtgcgcatggacgagtacatggataccgtacgcgccttcatcgggtcgcatgcggcccgctcttagcaggcgtctctagtctcgcgtcggatccttctgcagaagcaggaacacgagcgccacgaccagcagcagcaccgcgatagacagcacgccgagcgaggctcgtggtctgcgacgcatgagtgtgaccgtgagctccccagctgatgagcgcaaaggcagagattggtttcgcgtgggattgtcccgatgtcaaggtcatgatgcaaaagcgttggctctgttagaccaaggttgactttttgacttgtattgtagttgctgagtagctacaatagtggtatgagaacgggcaaggtggcgcgtatagccgataggggcaggaaggaactgggcgaactgacgccgcaggagcgtgaccttgctgtcaaggcgttacgcgacgccctgtacgaggggttcgcgttggacgcggcgacgagcgacccgaaccagatggaggcggtgcgtgcgctgcggcagcatccgcatcatccgcaaagggcgtggacgtgacggctcccagcgttggaagtgcatgaactgcaacaggacgttcggcgttcgcacgaaccgggtgatgggcatgagcaagctcaaggcgggcgtatggatgcgttttctcgaatgcttcgcggattgcctgagcttgcgcaagtgcgcccagcgttgcggagtatgcctgaagaccgcgttcctcatgcgccagcgcgtcatcgagtgcatccgccgatacactcccgtcctgcgttccgaggccgggtcgtgcgtgcggttggacgagacgtacttccgtgagagcttcaaaggcaaccatacgaagtccgccgtgttcgtcatgccccgcaaggcgcgcaagcgcaccaagtcattgaggaagcgtggcctgtcgaaggagcagatatgtgtgacgaccggagtggatgacacggggcgttcgttcctgaccgtgtgcgggcgcggcgtcatctccaaggatcgtgccatgagcgcgttgaaaccccctatcgggcgcggcgccgacgtgctcaccgacggggctccggcctacgtgaagccactggccgaactgggtgcgaacctcacacaaaccgacgcggacgatcacgcgatcaacagggtgaacaccttgcacgcccgtttggaggacttcatgttcggcttccacggcgtatccacgaaatatctgcaggcctacctggactggttccaatggctcggcgcgttcaccgacggctgcggcgacaccggcgacgaccgtctgctcgcccgccagctcggcaacggcctgtaccgcatccgccgccgcgactaccagcgcatggtcccgccatacatgggctactggcaaaaagccgcatgacatcgtgcatacgatgtacagtcagaacatcgaaacataggacaaggaggcgcgtatggcgagcatacccaccacgaccatgaggatagatcctcagctcaaagaggaatccagccaagtgctcgaagacctgggactcaccctttccggcgcggtcacgatctttctcaaggccgtggtcagggaacaggggctcccgttcgaggtcaagaaggaaacgaaggacaagcagtagatgccgaagaaggttcaacaaaccgagcacccggtgctggacatgacaatgcccgaacgaaaagccactgacatgagcggcttcttccgtgaccataagctgccggaccaagacgtgaccggattctccgatggagccttgtttacgggggacagcatcgaatggatgaagaccatcaacgatgaatccattgacatggttttcgccgacccaccgtacaacatcaaaaaggcggactgggacgatttcggctcccaagagcgctacattgaatggtcgatgcgatggatagaacaggcttcccgcatccttaaaccgaccggaagtctttacgtgtgcggtttcagtgagatactcgccgatctcaagcacccctcgatgaggtatttctcctcatgcaggtggctagtctggttctaccgcaacaaggcgaatctcggcaaggactggggacgttcccatgagagcatcctgcatctgcgcaagaaggatttcgggcacatcaactacgacgacgtgcgcatcccctacggcaagcacacgctgaaataccccgatcatccccaggcggattcatcccagtacggacgcaagggaagccactggacgccgaacccattgggtgcgaagcccaaggacgtcgttgagatacccaccacatgcaacggaatgaacgaaaagacacctcatccgacgcagaagcccgaagagctgctcagaaaactcatcctcgcgtcaagttcggaaggtgatctggtgctcgatccattctccggttccggcacgacagccgtggtggcctcgcagcttcaccgccaatggctggcctgtgacgaaaacccggagtacaaccaatgggccacgcaaaggcttgattccatcgaccatgcgcggaccgtcgaacagtggatggcctttgaccgagacaattacgaaagaagaagatcaatccgatgaccatgacattgagccaactggcggaatgggccaaagacaaggaacggttcaccacggttgctgattgggcaaacttctgccgcgagtacctgcaattcgcgcaaccggaagcgatacaggccgtgatcgtgtccacgaacgagcacgtctacaacttctaccagtacaaggaggacgggaacttcaagatcactcgcccgctcaacaccgatctgatgatcccggaatcagagttcgacgccgccgagggaaacgtcatggaggcgttgaaagacattcgcagtatcgccgaagacatggacgcccggcgcacgctgaacaatttcgtctacacgtgtcagcaaaccattggcgcgaccttagactcgttgccgagtgtcaacactgcgaggaaactcaatggagacctcttcgagaagtacattcggagaatcctcaacgagatcggggccgaaaccggtgagggcaccattcaagtgcccatcaaggtcgaaggcgtcgaaccgttcactatggcgtaccaacatgatttgattgtcaggaaagacggcgagaccaaggctatcgggtcggtgaagacgtccagcaaggatcgtattgacaagatattcatcgacaagttcatgtacaacgtgctgaccgacagtcttgacatgcctcatttcgcggtgttcctcaatgacgtacaacgcgccggcgggaacaacatgcggcatcaaaaagtagcacaaaccttcctgaccgggcatttcaagggttacaccattaagctcaatccacttgacggcgtctactattgcgatttgcgaccggtaatgaagaccgatgaagttctcaagaaacagatcagcactcttgacaatcttttggtcaacgacatctggaaattcatggagtaaccatggaacgccgccacgcatcatgtgggcggcgttccatgtattaagtcaaccttggtctaacagagccaaagcgttaagcatcctacggattatattgagaaaagaagtcattagtaatacaattggctttagaaaggattcattatgagcactaccactgttcgcatggatgatgatctcaaagccgaagtgaacgccattcttgattccatgggattgaatttcaatacgttcgtgaatatggccagcgtgcagttggtgtcgcagcgtcgtattccgttcgaggtgagggcgcctgaacccgtgctgcctcacgcgggacatgttgccgccaatggagttacgtaccgtggggtcgacgaacagggatatccggtggtcgaagtgccgaacgccatggtgttgaatccgagccggggctccgatggtgttgccgtactgcccaaggcgtggcgcgatggcgaataatcatgatattccggaattgatgccggttccggagcaactgcatgtcttcgacgtgtatcgcatgcgggtgcggttcgaggatgatccgacgaaatcacgcaaccatacgtggccgccatcgtcatacaagccgacgacgacggtggagtggctgtgaaactgaccagcaatccaacttggcatggggcgggcgatgtgcaactgcccgagtatgagcatgccgggcttacccatctgacgaccgctcgctgcgcgcagctggtgcggttccgccggtcggatctacagggattcgccggtagattgagtcggaatgatgccatacgtgtggccaatgcggtcggcgaggtaaagcctgaagaacaggtgtggctgtaattctgttctgccgtctaactggttcggggtgttcactgtgaaccagtgcgcaattgcgatggtcggatgtctttctacagtccgcttatatgtgaaggttttgtggtcgacgttgcgtcatatgttgcttgtgacgttgcgtaatgcggcatattgcttggtgaaaggaggttaggccatgtcgatggacgatgaaacggacagccgatacaccacaggggacatcgccaaactcactggtgtgagtgtgcgaaccgtgcagtactacgacgccaaaggtctgttgattcccaatgagatcagcgacggcggccgaaggctgtatgggactgcagaggtcgagcggatgcgggtcatcctttttctcaaaggactcggcttcaagctggagcagattcgctcgattctgtcggacgagcggccggaacgggtgctggttgatttgctggatcagcagacggcatccttgcagtcgggtatcgccgagcagaagcaacgtcttgatgactgcttgcagctgcgcaaagcactgacggtctcggcgtctgacttcgtatcgtcaacattaaccgacatggcaaccgttatgaacaccacaaccactcattccctgcgcaccacatatttggtcatgctggcaatcacattgcccgcgactttgttgcaaattgcatgcctcgtcatcggtgtgatgacagacgtatggtggccgctgccggtcgccgttctgctggcgattgcgctcactgttgcggcgatgaagtactatcgctcccgcgtgcagtacctatgtccggcttgccatgagaccttccagccgggtatgcgagagttcgtattcgccgcacacacgcccaagacacgcaagcttacctgcccgcattgcggtcacagggggtattgcatggaactcagcatctgaaagtttctgattatagcgttcgatttaccaacggtagttgtcgcagaatttgcgacaactaccgccctgtcaaaatatgtgcgttgtgcagggctaaattgtttcaggtcgcggctcgggcggtagggtctgccgttttatcgctgcttcggcgttcctgttgctgattgatgggtgatattacgcttgcgttgggtccttctgcaggagcaggaagatgagcgccaacaccagcaggatggcgatggaaagcacgccgagggaggcgttgccggtgatcgacgtggtggtggccacgaggaacgtgcccagaatgctcgcggtcttgccgaagatgtcgtagaagccgtagtactcgttggcgtggtccttggggatgatcttgccgtaatacgagcggctcagcgcttggatgccgccctggaacatgccgacgaggatcgccaggatccagaactgcgcggccgacacgaggaagaacgcggcgaagaacacgatgcacatgtaggccacgaccgccgccacgatcatcgccttgcagccgaaccgcccggccatccgcccgtacaggatcgcgcatgggaacgccacgaactgcgtgaccagcagcgccaccaccagctgagtcgagtcgatgcccagctcggcgccgtacgaggtgctcatcgagatcaccgtgttcaccgcatcgatgtagaagaagaacgcgagcatgaacatccacagcggcttgttcctcactatcttgcggaaggtgccgccaagctcgcggaaggtgccgcgcacggccgttcccagctggtcgcgtgtggcgcggtaatgctcctgacggtagctggagatcagcgggatcgtgaacgcgacccaccagacggcggtgatgatgaacgatgcgcgggtgcagccggtcgtcgtccagccgaatggcagcgccgggccgccgaagatcaacgcgatgcacacgatgaacggcacggtcgagccgatgtagccccagccgtagccgtgcgaggagaccttgtccatgcgttcgttcggcgtggtgtcgatcagcatcgaatcgtagaacgtgagcgagccgttgagtccgatcgtcgcgaggatatacacgaccaggaacggcagccacgtcagtggaagcgccatcgcgcagcacgtgacgacgccggtgccgaagaagccgaggaagaacttgattttcatgccctgcacgtcggcaatcgagccgagcagcggcatgagcagcgcgatgaccagcgatgcgatggtctgcgcgtagccccaggccgacacgatgttgccgtccgcgggcatcagcgatttcgcgtagatcggaatcaccgcggtggacagcagcacgaacgcggagttgcccacgtcgtagatgatccatttcttctcgcgcggggtgagtttcgcggtggcggtgagggccggctctgtgccggccgctgcactgtctgccgggccatcggcgggtttggctgcgatgctgtcgttcatggggactcctgacgtcgtgttcatatatatcgtaaagtgccgtttccggcataccaagtttccatatgaattgcgggtgaattgttgcgggccggcgggagtcggacgggttgggcgggtcaggcgcgcaatgggccgcgtcgatcgtggcgatcgtcatcggggtcggcgttcgttatctggtacacctattatgcgtggcgcaagcccgatcccatcgaagaggcgcggcgggcggatatgttcgctcgcggttggacgccgctggacgaggacgtgcacttccctccggcgtggttcgccaagatttccaagctgaggacggtcggtagcgaaatgccgcatacgacatggggcaaggacggctggatcacgttcaactatgacgtgatgcagttcatatcggacgcgaaccccagctatggcaccgatatcgtgttcctggtatgcccgtgcacggtgccacgaggcccactcatgtgggcgaccatctatcagggtcgcaagatgtttcagcgcaccagcgagcagggcggcatgcccgccgacgtggtcgaactgctgaagatgagcccgtacagaccgaatctgatcgtgatggatggacgaatctacatatggttgcgggtgaattacatgccgttgccgcagcgtttttctgaattatccgctggaaagcgatctgattccgttgacgaaggaactgcatcgcaggctcgcccgcgatatggggattgtcggccagacgccgtggggtggccgcgcctgagcggtcatcggcacggtgattggtccaatagcgtccttaagtgcgcgccgaaacgacaagtgcgcgcacatagggacgcaaaacacccgatttgcgtccctatgtgcgcagagtcgtccgttcggcgcgcacttaaggacgcaaacggaacgacagcgttgcgcaacaatccatatcggccgggcgacgctgcgaggaatggctacttcgcggcctcggccggagtctcgtcttcctcgagcttggcgatgacctcgtcatagccggggcagtccggaacgccgttgatggaacgctgaatgcccagcgaagcggccgcgttggcgatcttcaccgcatcgacaagcgaccagccgcgggcgatcagtgcgcacatggcaccggtgtggcacgagcccgccgaacgggtgtgcgtcgccttcgtcggatacccctccacatggatgacttcgccgcccggcgtgcgcacccacgcgccgcgcgaccccgcacgaaccaccagcggcgcgcgcagcgtggcgccgaggctgttgcacagcgccttcatcgagtcgtcgaacccgccgccgacggtcatcgacagggaatcgtccacgaacacgccaagccggtcggcgagcgtgcgggcctcctgacggttgcaggaccagatgggccgcaccagcaccagatcctccagcaggtggtcgctgaccatgtgcagcgtgttggtcggattgagcacgatgctgtagtcgcgcgtcgtcgggtccgaagaggtgcgatgcaggaaggcgtcgatgcctgacgcgctgtgatccatcagcgtgttggcgctgatgtgcaccacatcgccctcgccgggctccacgcagtcgaacgtgttctcgttgccttgtgattcggcgccatacgtggcgacgaacgtcttgcgctcgctgtcgttgagcaccagacggaaaccggaatcggcgtcgatgcggtcctggccgatgtgctcgatgccgttgtcgttgagagccttgcggatcagtgacgcccacggcccgttgccgatgacgcctgcgtgcttggtcgccgccccaatccggctggccgcctgcatgacgcggaagctgccgcccaccgacggcatggtatggttcgcgacggcgaatccgcccggttggggaatcgcgtcgatgtccatcatgatgtcgacccacacctgtcccaacgagatcactgtgggggagggcacgtcgtttttgcgtgaaagcaggcctttaagtgaattgagcatcattcctccttgacgattgccgcgttgcatgtatcgtatgccatacagtaaccgttttaccgtgattttatgaagagttgctggatgcggcaatagtcaagacgggtgatattgtgtggatgtgtaggtgaaagccgcaatgatacacgcttgatttgcatttgtttgtgtttggcgctattattgtgaagttgtgtgttcaagcatccgtgctggaacacggaagacttgaacatcaaggttattaagggagtccatcatggcagctcgttgtgcagtgtgcggcaagggtccgcaggtcggatacaccgtttctcactcgcatatccgcaacaagcgcaccttccgcccgaacctgcagccggttcgtaccaccgttgacggccagaacgttcgcgtccgcgtgtgcgtcaagtgcctcaaggccggcaaggttcagcgtgtggttgcgtgacatcgcgcgataacgtttcactgaggccccggaagtcgcaagactccggggcctctttatatccgctggcggaggggacaatgcgatgccgtcccgccggcacaccacaatagggacgtatgagcatcacgttgaacaccaccatgtcgtcgatcatgacgaacaagcggcgtgtcggcgcgctcaaaagccttggcgtcgtgacggtgggcgatgcgttgacctactatccgttccgcgtcgccgatccggtgcccctgcgggcactgcgcgaggcccgtatcggcgagagaatggcgttctccgcgtcggtgcgcggcatgcgggtcgtgccgatgaacgttcggcggggctaccggctcgaggccgtggtggatgacggggatttcgcggtttcccggcatatcgcgggggccgccgcccgtttggtgttcttctcgtacaagaagcagtatgtcgattggctgagcatgcggctgcgttccggcgcgattgtggtgatcgccggcgagccgagcgagttcaacggccaactgcagttcacccatcccgaaataatgacggtcgctcccggctccggtccggctgatggcgaatactccggtgtcgtgcagatgagcgctctgaaatacgacgccgacaccgtcgaagcgggcctgcgtcgcatcagcagaccccgaccggtgtatcacgcgtcgtctcgtatctccagcgaacacattcatgagtcgatagtgcaatgcatcgagttgctggccggaaccgggcaggatctcccgggcgatgcggcaacggaagccccgcaaacaatgaaaccgatggaagacggcggcatcagcggcgccggaaccgctccagcggatgccgagtctcggtcaggaaacgccgtggccgtcggcctggcccgcgcgatcccggacgtcctgcccgaatcggtgcgcgaatcgaatcatctgctgcatcgcgcggaagcgttcctggccatccacgacccgctcaacaccgcggatttcaaacgggccatcggcacgatgcgctacgaggaggcgttcgtctcgcagacggcgctgctccagtcgcgtagcaatgtccgcaaggatgcggccctgccttgtgcgggcgtggcgctgcgtgaccggttcatcgaatcactgccgttcccgctgaccggcggccagcgggagatcatcgatgatatcggcgtggacatggcccgcgaatatccgatgcagcgcctgctgcagggcgaggttggttccggcaagaccgtggtcgcggtcgcggccatgctgcaggcggcgggttccggccatcaggcggtgcttgtcgcgcccactcaggtgctcgccgagcagcatcatgcgaccatcagcgccatgctctgcgcgattgacagcgtcgagacgggcgatgacccgtcccgcgatgccctgtctcccaatgacccggccgacctgatcaaggccgccgaatccgctgccgatgacggagatgccaaggggcgcgcggccgtgaaacatcccgtgaaacacagtggggcacgcagtgggaaacaagacggcgcggcgcacgcgcagtcggacgcgaacacgcggcacgtgccggtcatcctgctgaccggcggcatgaaactggccgcccgccgccgtgctctcgcgctcgcggccagcggcgacccgtgcatcatcgtcgccacgcacgccgcgttctccaagacgttccaggccccgaacctcgcgctcgtcgtcatcgacgagcaacaccggttcggcgtggagcagcgcgaatccctgcgcaccaaaaacgatgtcgtgccgcacctgctggtcatgaccgcgacgccgatcccgcgtacggcggcgatgacctggttcggcgatctggacatctcgtggctcaccgagctgccgggcgggcgcaagcccatccgcacgttcatcgtgcctgaagacgacggccggatgatgggctccatgttcgcccacatccgcggccgcatcgacgcgggggagcgggcgtatgtcgtctgcccgcgtatcgatgccgacgatgaatcggacggcgatgacgatacaagtggggcatcgcagatcggcgtgtacgacgattccgacacctacaggcgcgaatccgccaacacaaccaccagcgcgccatcgcaggaggatggtgacggtgctccgtcacggccgccgctgcattccgtggccgagatcgagcgcaggctgtcatcgctgccgcagttccgtggcatccgtttcgcgacgctgaccggccgcgacgatgacgcgaccaagcagcaggtcatggccgatttcgcggatggggccacgccggttctggtggcgacaacggtcatcgaagtgggcgtggacgtgccgcaggccagctgcatcgtgatcttcgacgctgaccggtacgggctttcgcagctgcaccagctgcgcgggcgcgtggggcgcggcggcacggattcatgggcgttcctgatttcgcgggctgaggacggcggtcccgcgcagcagcgactgcaggtcatccagggcacgctcgacggcgcccagatcgcgcaggccgatctggagttccgcggcgccggagacgtgctcggcgatgcgcagtcgggcggcaagtccggtctgaaactgctgcgcgtggtcaaggacgccaagatcatcgccgacgcgcgcgaacgtgcggggcggttgctcgccgatgaccccgatctgtcgggcgaggtcgagcttgccggcgcggtgcttgatttcacccgcggcaacgagacgttcctgaccagcagctgacgcgcgacgggcgatatgcgccgcggatagggtcgttggacacgagccccggccccgccatccgcgatcgaacaatgtggcgcttgaacacagtatagatttttcatatgggaacggcgttctcatcgccggcatgatgtggttcagttgtcatgaaggtttcggccggggaggggcatcatggcatcatcacgttcactgcacacggttcatctggccgctttcggcgcgggcaatgtcgtcggtctgggggtcatgtcgatggccggcatcggcgtcggcatcacgggcaccggattgtggctcgccgcgctggtcggtggcctgggaggcgcgttcgcgctggtgccgcagctgctagccagctcgtccggcgattacccgggcggccagtaccagcaggtcggcacgctgctgccgcccgtcttcggcggcatcgtcgcctatatcctgtgttttctcgtgttcgacatctccgcgtacgcgctgtccgcggcgcagctgctcggcctgcccatgctgccgacacgcctgaccgcggcgttggtcgtcgcgctgttcctcggcgtgcacatgctgggtgcccgcatcgccgccatcgcccaactggtgatggccgtgctgctcgcggcggcgttgggcacgtacgttgcggtgacaatgccgcacgtgcggctcgcgaatctcgcgcattacacgtttctcggctcgcctctggcgttcctgttcgcatgcgtgtacatgacgttcatgatgaacggggtggccggcgtggcgaactatgccgcggtcgcggaccgtccgcgggtgacggtgccccgcgcgatgcgcgtctcgctgttgctggtcgtcgtgacgtatgcgctgatctgcgtggccgatgccggcgccttgccgatagcccaggtcgcgaaccgggatctcgccgtcagcctgtctgcattcgtcccggctccggtgacggtcgcgttcgtggtgggcggctccgcgttcgccctgctcaccacgctcaatgccgcagtcggctgcatggcgtatccggtcgcctcggcctgcgcggacggatggttgccgcgcgaactgggagagcgttccgctcggaccggcgctcccgtgcgcctgctttcggtgggcatgatcgccgcggagtgcccgctgatcgccgggaattccgcgaaaaccgtgtcgtcgagcgtcacgattctgatgatcgtggtgcaggcgatggtcgccgtcgccgcattgcgcctgatactgcgcgacggctcatcgctctgcgcattccgctcgctgccgttgctcggccgcgtgctgcaatccgggctcgcggcgttgtgcatcgtcgcgctgctcgtcgacctgctgctgatcgcatggctgctgtacacgatgaaccgtctgctgatcatcggcaatgtcgtgatattcgccataacggttgtcgccgctgtcatcgtgaacaaatatagggttgatacgaggccataacaactatgtataaccgcgggtttgccaacgcggcgacgcggagcctacgatgatgtcaacgttcacgggaacccgcgaacaggcccggccccggatgatggggcggcaccccggtcaggtgtcttatccgagcaaggagtacgttatgtgtgtcaatgaaggcgtgaaggcatcggctgtcggctcactgtcgggcggactgccgatcatgcgcgagcggtgagagaccgctcgatagtccgtttcggatgtttgccggcgcgatcgcgatgactgtgattcgccgtccggcatgattcctcacactcccggcagattacgccgacggttgccggatcattcgcggcgatgcggattctgccgcatcgcaggttttcgtatatcgcgattcgccgccaccagactgtaccgccgcgccgtatccaaaaaaggcgcggaagacaagaagaagggaatatccatgtccacatcatcagctcatcatgaagcgccacgcaacgggcggcccgtgaagcgccggcttatccgcgtgctcgccggctcggccgtgataggcgctatggcggtcggcggcctgcaattcgcgctcggcacggcctacgcggccggcgacgtgtgcgacctgtgctcgaccaactacaatccggtcgcctgctgttccagtggcggttcggcctacgattccaaccccggaggcggcatcgacgtctcagcgcagaaggccgcgttcgacagctactgcgcgaactacaagaaggagcacgcccagaaggaggagccggcgacgcccgcccccgccacgaagccgagcaacccgaagcaatcggccccggccccggcgaagcagtcctcgggctcgccggccacccagacgacgaagccctccacgggcaacaccaccgcgcaacagtcgcagcccgcgcagtcgaccggcacacagtccggccagagcacgacgggcagcacagccgggatcacaggcgacacggccgcgaacgccgatgccaccgccactcagacctcgaaggacgcggcctcccggaagaacagcgatgacaacaccgccgacaccgctggcggcgagaccaccacgaccgaatccggcatcaccgacagcggcactgatacggcggaaaccaccacgcaggcctctccggtcaccgatcgggccgaaaccaccagcccggtggtgcgcatcgtcgccggcgtggtcatcgcgctcgccgtcatcggcacgctgggcgccgcgctgattgtgcgcaacaagcgccgcgctcccgcgctcgccggagcgaacggcggccggtccgacgacggattcgacatcgcagacggcgcgacgccggcccccgcgacgacggcgaacgccattgccgcaaccgaagcccgtgccgacgcgagtgcgccgaccgaagtgctgcagcccatcgcatcgccggcgaacggaccatccgccgggccatcggcgagtctcaacgtggccgacagcggcggcgctcctaccgcacggtatgacttcaacctcgtcgacggaccatcgtcccgctgagccatcggcgcagcagtaccaacgcaattcgatacggaagaaatacagaagggaaccacaacaatgtccaacaccaaccacagcctcacgagaggctccatcgccgctaaagccgcggcgctgctcaccgcggcggcgctcggtctcacgggattcgcgctgacgggcgggaacgccgcgtccgccgccgaaaccacgcccacggcggcaacagccgcacaatcccaggaagacacgccattcgactactacgcgggcatccccaacctgccttcggatcacgtgttcgaaaacatcacgctggaacgtctcgaagacatcctgcgctacggcaaaggcaacttcgtgatactcatcggcggcacgtgggactccgcgacgacggccgcactgcccgccatcaacaccgccgccaaggcgcagggcatcgagaaaatctacaatttcgacccgcacctcgacaacgccggagccgacacgctcgtcaacatcaacgacaagaacaacgcggtcgacgcattcgccaagcggttccagcagaccatcgacgaattcggcctgaccgacttgcaaagcaagaacacagcaaacgtcgtcgacctgccgaccctgttcacctacaacaaggacaacaccggcgacaaggtgctcgcatccaccgcgaacgttgccgacagcgccgagctgacccgcgtgctgggcaccgcgaagaacgccgcgacccgcaccaacggccagttctacaccaactactacctgaacaacgtctcggccggcgcggccagcgtgttcaagcagggcgaggacaaggacttctcgctcatatcggtgacgtacggcgaactggagaagctgctgcagtcgccaggcaaccattacatcttcttcggcgcgacctggtgcggcaacacatacgccacgatccgctacgtgaaccaggaagcccgcaaatacggcatcaagcacgtgtacacgttcgacacgatcctcgacagcacgtccggcaaaggctcgccgttccacatccgcgacaactacaacaacggcagccacccgctgtcggacctgtacacgcatctcgtgaacacgtacctgccgaacctcgtgaccgaggacggcagccacggcgtcgtcgattccaagggcgtcggcgcgacccgcctgcaggtgccgctgctgctgcactacaacaagaacaacgccgcccagctgcccggaaccgaccagccggccggccccgtgaccgatgaggtcgtggactaccacggcaagaccgcgaacgtcgacgccaagccgcagcccacggcgagggaatacatgctcaactggtacggcaccacgtacgacgacaaggcgatcatccaaggcggattctccatcaccggtgacgacctgagcgcggcgaagaactacgggcgcaaggtcaacaacgaccgtgacgcatacatcgcccaggccgaccacttctactccctgctcaacctgcgcggcgaaatcgcacaagccaagacggtgagcctgaacggttactccgccgaccgggtcgccgcattcaagaagacgctcgccgcggccgaaaagaccgtgtccgacaagaaggcgaccatcagcgcgaccgacaccgccacgaagaacatcgccaatgcggtcacggcactcgccggaggcaacaacggcggtagcggtaacggtaacggcagtggtagcggcgacacgggtaacaatccggtcgcaggcaacactgacaacgctggcggcaacgatagcacggccggcaacaagccgtcccgcaaaatcgtcgtcgccggcaacgagccgctctcccgcaccggtgccgaagccacggtcatcgcatccgtcgcgctcagcctcgcgctgaccgccgccggggcgctggcgctgagccgcaaccgtggcgacgccgcggcggcacaggctctctccgactcgacccgcccgacctcggcgaggtgagctgactgatgggagcgctatccaacatcgatcccaccgcagtggcggtctgggcgtcggccgtggtgctgttcgccctgatcgccgtgctgcgcgcggtcttcaaactcaacttcagcctgctgacggtgctcgcgcttgggctgggcatcgccctgagcctcgtgttcgacgggcaggtcgactcgctcaacctgctgggcaacatctacatcagcctgatcaccgcgctggtcgcgccgctgatcttcgtgtcgatcatctccagcatcacctacgtcggcagtctgaaaaagctgcgcagcatcggattgcggtcggtcggctggctgctgctcaccaatctgatcgccatcgtgatgacgctgggtgtggccatcccactgcacatcggctcgggcgtcaaactcgtcgacgacgagtcgaccgccggtttcctcacctcgcagacagcgccgcttgaccaggtcatactcaacttcttcccgaagaacatcgtcggagacctgtccggcaaccgtgtggtgcctatcatcatcacggccaccgtgctggccatcgccatcgtgtcggtcggtcggcagaaggacgtgagcatcgtcaagcggttcttcgagcagaccaaggacgtgatctacaaggccgtcggctacgtggtcgagctcaccccgtacgcggtggtggtgctgggagcgacctcgacggccgcgaccacatccaaggcggacgcgctgctcgcgctgctgagcattctcgtgctgggcttcgtgctcaacatcatccaggcgttcgtcgtcaacgggctgctgctgaaattcgtggcgcacgtgccgcccttgacgttcttcaaggccgtgctgccggcgcagaccacggcgttcgccacgcagtccagcgtggcgacgctgccgctgagcatacggcagctcggcacggtcggtgtcggcgcggacgtggcgaacttcaccaccccgatcgggacgaccatcggcatgccgggatgcgctggtgtgtggccgatgctgtcggccgtgttcaccatcaacgcgctcggactggggtattcgccggtgagctatgtggcgctcgcggtgatcggactgctgtcgtcgatcggtaccgcgggcgtgccgggcactgcgatcgtgaccgcgacgaccgtgttcaccgcggttggtcttccggtgcagcttctggtgccgctggtgccggtcagcaacatcgtcggcatgccgagcacgatggcgaacgtgtccgctgcggtcacatgcgcggcgatcgtatcgcggcagaccggggagttcgacgagggcgtgctggattcggctcgtgccgggcggcatcgccatcgcgcgggcgtggtcgtgtcgccggctggcggggcggttgcggctcctgtcgttcctgttgcggctcccctcggcgcggtgggtgttgcggcgtccgtcgtcgcctcgcccgtcgcggctggagtcggtgcggcccataagccggtgcagccgggattcgcggtgacgcctggattgtcattgacgttgcatcagtcgatgctgcgtgtgcaggccgacgacgatgccgacgacgctccggtgcccgttggcgcgtgcggcatctccgcccacgccgccacggcaaaagccgcataggctggcgagtgggctggctggggccgcctccagtctcgctacgctcgacagcccccgctggcggggggctgtcgagcgtagcgactgggggtggtcgaaggtatgtccagatgaaaaagcgacccgcaaacggtcaaattacgcgggtcgccgtgagtatccgagcaagggtacccgcaaagcatcatagcatatgaggcatgtgagcaagctgagtcgcgtatcggagccgtctgatatatggcacgtacgacccaggaccggtggtgcggttgcggtcgtttcgccggggcggccataatggtgtcatgcatgtgatttcaggacgattcaagggcgtcgcgttgaccacgccgaaaaccggaacccggccgaccaccgaccggaccaaagaggcgatattctcgcatctggattcatggcaggggctggacgacgcccgcgtattggatctgttcgccgggaccggggcgctgggcatcgaggcgttgagccgtggcgcgagggagctggtggcggtagagtcctccgctccggcggcggcgctgatcgccaagacgttgaccgcgctgcagcggaaccgttcgtgggagcgtggcatgacggcccgggtcatcagggccagagccgagaagtacgtcgcttcgggtgccgcacgctcggcctcgaacgccgatgctgctggcggctccgcgaagtcggcggcgttcgatgtgatcttcatcgacccgccgtacgcgttcgccaccgaggactgcaaccagttgctctcggacatggtcgcccatggaatcgccggcgggaatacgacgatcgtgttggagcgatccgcgcgttccgacgagcccgtgccgcccgagggatgggtcctcgccgagcatcgcgattatggcgagaccgcggtgtggtatatcgagtccgcgcttgagacgtcggaggcctcggagacctcgggcgcgacggatgagtgagcggccgaggcgagtgtagcccgttgctgcgagcccgaagcggtcttggcccaatcgccgccgtgccgaatgttacctagctaatattctctgacagagaacatcggcatgtgggtcgcatggcgcacgtatcgttaatcatggaatgcctcgaatcgagctattaaaagacggtgaaacaacaaacgcaatgccatcgcgaaaggatgccatcatgtcgaacatcatcgaggaactcaaggcccgtcgctcgcagtacgcgctgacctccgaatccccggtcagcgatcaggagatcgtcaagaccgtcgaggacgtcaccgtgcaggtgccgagcgcgttcaactcccagccgcagcgcgccgtcgtgctgttcggcgacgccaaccggaagctgtggaacatcgtcaaggagacgctgcgcaaggtcgtgagcgatgacgaagcgttcaaggccaccgaggccaagatcaacgctttcgccgccggccacggcaccgtgctgttctacgacgacaccgacgtgaccaagcagctgcagaagaacttcccgacctacgctgcgaacttccccggattcgcccgtgatgccgccggcatgctgcagctcgccgtgtggaccgcgctcgccgagaaggggcttggcgcatccctgcagcactacaacccgctgatcgacgaggcggtctccgccgaattctgtctgccgtccagctgggtgctgcaggcgcagatgccgttcggcaccgtcgcccaggccgcggctccggttgacaagcagccggttgactcccgcgtgaaggtgttcggcctgtaagccgaatggtcgctcccgctgacggggtggggacgaaataccaacgaaccaataaaaaacccgtgaccggttgcatgttccgcatgccggtcacgggatttttgcttgactgttgtttccgccgccgacctgtacggccggccatcaggcatcagccctcaatggcgatctggtgcttgctttcgacctgcggctgcgcctcgatcttcggaacctgaatgcacagcgtgccgttctggtagttggcgtggatgtcgttctccttcacctgatcgccgacgtagaagctgcgcgagcaggtgccgacgtaacgttcacgacgaagccacttgccggactcatccttgtcgccgctgccctcgtccttatgggcggacacggtcagatagccgttgttcagcgagacgctgatgtcgtccttcttgaagccgggcatgtcgatgtccacgtcatagcccttgtcgttctcgcgcacgtccgtactcatcatgttcgtcggggtcatcgccgcgctgttgtcggcggaacgccaaccctcgaagaacgggtcgtcaaacaggtcagagaacatcgtgtcattcatcaaagccggaaacattgccataatcggtactcctcgcatatcggagtggaacgggttggcttgccgcgccggccgggtgactggccttgccggtgtggtctatcgtggccgttcccggaacccctctcggagctcctcctcttgccttgcaccactacctaccggtattccgtcctgacattcccggcttttacccacagtgaaaaagttgagtgtgtgagactcaacttttgcgggggtggtggctgatgacgtgtgtcaagcgacttacttcagcttgcgcggacgagctccggagacctcccagccaagggcgatgagggtcttgcggtcctgcttgtcgagctgccggcaatcgagctgctcgatgagatccgggcgaatgtcgttggtgcgggtcaacgcttcgtcgcggcggaaccggtcgaccttgccgtgatcgccgctggtaaggatcggcggaaccgcgatgcctcgccacgtggccggcttggtgtactgatggtgttccagcagtgcgttgccgcccgtgtacgactcctcgacgatcgaatcgggattgcccatgaagcccggcagcagtctggtgatcgcctccagcatcacggaaaccgccacctcgccgccgttcagcacgtagtcgccgatcgagtattcgcgtacgtcgacgccctgcgcgcggtaatactcagggattcgcgcgtcatagccctcgtatcggccgcagccgaacagcagatggtcggcgtgtgagagctcggtcgcgtcgcgctgcgtgaacagcggcgccgagggattcgggaagatgagaaccggcgcggcgttcccgccagcttcactggtgtcgctcgtggtatcggaaacgatggaagtgacggaagcggctgcgtcggtcggattacctgcatggcccgagtcggccgcatcggtcgtatcggctgcttccgccgagttgactgcgccggacggactgacggaggccgaatcatcgtcgtgcgcgtcggaagataccgcgtccggcgcgatgactgcgggtgccagaccgagcaggtcatccaggcattccgcccaaacctcaggtttcatcaccatgccggcaccgccgccggccggcgtatcgtcaacggaatgatgcacgtcatgcgtccagtcgcgcaggttgtgcgcggtgacggtgacgagacccttctcctgcgccttgccgaacaggctcaggttcagcacgtcaaaatactccggaaacacggacacgatatcgatcttcatgttctccagcgtagcgaatcccgcagtccgacggcatgagcgtcgcgacacgcctggatgtgtggcatggttcgtcggcgccggctgactggaatcgcatgattccgatgtcttttataaatcgcgtctgtcagccttgctacgcatccgggcgtgccgcattgttgccggactcggctcggcgcccggcaacaacgccgtcatgtatgacagtgtccgacagccgcagctgtcggacactgaagggtgaccggggccgaatcacagtcccggaatcagcccgccgggcgggtcgatcgtcagatacccctcttcgaggtcgatgtcgggcaccaactcgtcgacgaacggcaccagtgcggtcgattccgtcacttcgccggtgacggtgtcccgaaccggcgagaccaggcgaatcttcaacagcgtctgcgcgctgtcgagtacgtccacgaccttgcctatgacctggccggccggcaggccgagcccgttgccctcggcgagccgcgcttcaagcccgaccagatccttcggataccaggcgtcctcttccagcatgtcctcgggatcgtcagcctcgccgtacagctcgatgccattcgccgcctcggaggcgtcgcggtcatcaatgccctcgaacttaacgatccaacggttcttgaatgtgcgcgcgtactcgacgacgtattcctgcgaaccgtcgcgcgtgtacagcacggagtcgggagcgaaccgatattccggctcgtccgtgaagatctgcacggtgacctcgcctttgagcccctgcgcgcgtccgatacgacagaccctcagcaactcgcgctgctgagggtcgtcagagtgttgttgacgctccacgctagggttcacctgcgcacatccatgatgtcgacgcgcactttgtggtcggcaagtgcctgcaccacggtgcggatcgcattggcggtgcggccgctgcggccgatcacgcggccaatatcctccgggttcacgcgcacgcgaatgagttcgccgcgcgcgttctcgtgggacttgaccgaaacgtcatcgggaaaatcgacgatgttcttgatgaggtgttccacagcctgcgcgagcatgatcactcagcctgcgcttcctcggcgggagcttcagcttcagcggcagcttcggcttcggccttggccttggcgtcagcggcggacttcgcggccttcagcttctgggcttcggcttccacggcttcgacgcgagctgcggcgtccgggccggcttccacggtcttcagcgtgccttcggcgccgtcgaggcccttgaacttctgccagtcgccggtgatcttcagcagcttgagcacaggctcggacggctgagcaccgacaccgagccagtactgtgcgcgctcggagtcgatctggatggtcgaaggctgggtgttcgggttgtaggtgccgatctcctcgatggactgaccgtcacgcttgttgcgggaatcggtgatgaccacgcggtagaaggcgtagaacttcttacccatacgcttcagacgaatcttggttgccaaaatggctctccttgtaatactaggtttgcggattttcgattgtgtgtggggcacctcaaccgagaacccacgtgttcctcatgaaaggcagaatgagagggctccacccatcacgaataaccgataaattataacgcataggggtggatacccgacacgctggagctggcaagcgatcgtcggggtcgacgtggcaaaaaacatcggcgcgcaaggtgcctgacgtgatgcttgaaagcctggtcggcattcactggcggaggattcggggctatctgcatttcgaggggttgattcgtgttgttccgaatgcctatctgcgtttcgaggggttggtcacaaagtataagtggcccaagaaccgcatgattccggtggtatttcgccgatcatacttcggatatcgcgttttggcgcccccttgaaacgcagatagatgtccggcggagccgaaatcaaccccttgaaaacgagatacggccacatggggtaccttggccggtcgcagcgggcggtttcgagacggataacggcgggtttgcttggacgttgtccagcccgaagccgccatcgaggcctataccaaagaggccagggtttcggcggcggccgcgaactcctccggcgtggtgtaggagtagctcaggcgcagcgagttgtccccctcgaaatcgtagatgtcgccggggttgagcagtacgccgtgctcgattgcgcgctggaacaggcgccctgtgcgcaccggctcgtcgaacgtgagccagacgtaaaaaccgccgcgcggcacgttccagtgggcacggccggcgaacagtcgctccagcgtctccagtgcggcgtcccgccgccggcgtagctgcatgcgcagcgagaccatgtactcgtcatacaggccgctggacaggaaccgcgcgaacacccactggctcagcgtgctcgccccgtagtccatctgcatcttcacgtcggccaaccgttgcacgatgcgctcgtccgccacgatccagccgatgcgcagtcccggcgccagtgccttcgacgcactgcccagcgtaatcaccatgccggtctcatcgaacgatttgagcgtgtgcggcgtatccccgtcgaagatgaggtcctggtatgcgcagtcctcgatgatcggcaaccggttcgccacgcatgaggcgatgagcgcccgacggcgtggctcgctcatcgtgacgcccgtgggattgtggttggtggggattgtatacagcaccgcgtcgttctcgcgcgtggccttggcccgcggcggcagtgaggtctgcggggcggacggtaccgccgccgtcatcccctcggactgcgacccgccgcccatcagcctccccagcgcatccacgtcaaggccatgctcgtccatcggtacgccggcgagtttcatgccggccgattggaacacctgcagcgacttgatgtagctcggcgcctccgcatagaccgtggatccggccgacagcagactcaccgaaatcatctgcaacgcctgcaatgcgccggatgatacaaggacctgcccgggcgtgcagctgatgccccacgcctccatgtgcgccgctatcgcctcgcgcagcacgtcaaggccctccggcggcggatacccgagcgagcttatctcggccgcggcttcgccggccacgcgccgccacatgtcacgggggaacagccgcgggtcgagctcgccggtgccgagacgggttttcgaccggtcgaattcgagtcggtttatcgtctgaatggtgtcgttgttcgccttgaagaacccggacgacacgtaatccgcccagtccggcgcgcccggcagcatcagcgaccacgtgttgctggcgatgcgcgtgccggcgccgtgccggccttcgacgatgccgtagtcggcgagctctccgatcgcggcgatgatggtggaccggttcacgccgaagcgttcggccagtacccgctggctgggcagtcttgatccgatcggccagtcgccgcttgagatgcgggcgcacatgaaaccgacgatctgttcggttatgggctcgccgctgctgcggtccggctcccagttgatgtccaatggtgtgctgcgtgtcatgatgcctgatttttggttgggtgcattgctctgttcttggctggttgccaagtgtaatcgaatctgtagaatatggcaaaggtgttggaataaggcggattttgtataacttgcaatccgcgtgaggaaatccagctgatggcatattggctggttttggttgggtgatgatgacccaaccaaatgattgtcgggagtgatgatgggtctgtatttccagggcttgacgatgggattggcgtatgtcgcgccaatcggcatgcagaatctgttcgtgatcaattccgcgttgacgcgtacgcgtcgcaacgcgttgattactgcggtgatcgtgattttcttcgatatcgtgctgtcgctggcgtgctttttcggcatcggcgcgttgatgcaggcgcatccgtggctgcagaccgtggtgcttggcctgggcggcgccgtcgtggtgcgcatcggtctgggactgctgctaccgaagaagaagtcgacttccgagaacggcgctggggccggtgctgttgctgctgcgactgcttcgacggcgagtccggtcgctggtgctgaagcccctgccaagcgtctcggtctgcgtggactgctgaagaccgttggaaccgcgtgcgtggtcacgtggttcaacccgcaggccatcatcgacggcacattgatgctcggtgcgtttgcggctacgctgagcgcgcagcaggccaccccgttcatcacgggcgttgagaccgcttcagtgatgtggttcctcggcgtcacgctcgtcgtcaacgcgctcgcgcacaagttcaatccgaagatcatcggagtgctcaaccgcgtgtgcggcggcatcatcgtcctgtacggcatcaagctgctcgtggatttcgcgatggcggtgctgtagtcgggcaatccaagcctcgccgcatggacttctacgggagcccatgcggcattgttgttttgacgtgccgggggcgggccgtctcggccattctgcgttactgtgagcgggttgcgtcacgctgcgtgtgcccgcacagcgtgacgcaacccggaaacccagtgattgcaagggttttgtgggtgcgtcactgtgagtgtgcccgcgctcagtgacggtgggcgcgctcagtgacgcatatccgccatgctgtccgtgcggcatgccgctcaaatagtcattgtggcggtcagcgcgaggtggtcggtgtcttccacgacgaatgattcgacgccgctgaacgcgacggctcgtgccggctcggcggcggagcctgacgcggattctcgcgtcgcggccatgatgtggtcgagctcgatgcgcggccacggcacctgactggggaaggtattgacatgtccgcgagcctgtgccagtgcggcgtcgcggaatccggaccgcagcagctcgcggaagctggcatggtcgatatcggcgttgaggtcgcccatgagcaccgcgatatcgacgtcgggatatgcggaaccaccgccgcgtccggctttcgagccggtggcacgttcctcgcggccagtgcctgcgctgactgacttgcgcggcatcggaaccagcgcgctcagggaccggatgccgtctgaccattcccgacagccgcgcatcggcgatttggtgtgcgcggatgcgaatgccacggaggtgccgtcatcggtttgcagcatgatgcccggcacgtcggccgcaggtatcgagacaatgccatgcgtgccgcgtttcggcttggtgcgcgaccagatgccgttgaagccgccgttgtcggtcttttcgcggggcgtaccgagctgccgataggggaggatcctgcgcaggccgccgcgctcaagacgcttgatgagatccgtactgagttcctgaagcgcgaggacatcgatgtgtcgttcccgcacggccgcgatgatggcgtcggcgctcgccttgccatagcggcagttcaacgtcatcagatggtaggtgtcgccgctcgcctgcggcgggttcgcggtcggctcggcgtcggcggatcgcgcggtctggcgatggtcgtctgacgctgtttcatgggatgttccacgctggtggtgccatcgttcccgcggcatgttcgtccaatacggaacctgcatggcaagtatcgacacgatgccggcgacggcgacgccgcactgccaccacgagccgaccagaccggcccataccgcgatgaccaggtacggtatccacaaaaaacgaatcagcgcaatcatgtaaggcatcgtcggcatgtgcgcttcccgtccggctggcaggaaccgcaacgccgaccatagcatgcacgccgccagcagtatccacgacaacacgcccaccgccgaactccttacctaacattccaacgagtgaataatggctttcagtgtaccggcagccgttgcgaattcgcggcgagtggaaagctgcgaagatatggcaaatgatttggcgccgggcggggatggccgaaaacgtccatccccgcccggcgccagagaaaaacgggccgaatcagccgagcagaccggaaaggccgccgccgaagttgggcggaagctcgccaccgttcgcgtcgagcgcatcctgcagcccggccggaagagccggattctgcggcttcttcatgaaggcggacccgccggacttgccggaaccggagcccttgccggcgagcttgtcgcgcaacgccttctcctcggcctcgcgcttcatcggattgccggacttcgagcccttcttcttgctcttgctcttgcccttcttgccgccgcctaccgcggggcctccgaaaccggggatgccgcccatggccttgttgctcatgcgcttcatcatcttcgcggcctgctcgaaccgttgcagcagcccgttgaccgccgagacggttacgccggaaccataggcgatgcgggcgcggcgagagccgtcgatgatcttcgggttgcgccgctcttcgggggtcatcgaccggatgatcgcttcggtgcggtcgatctccttctcgtcgaactgctccagttccttgcggtgctgcgccatgccggggatcatgccgagcagcgacttcatcgagccgagcttgcgcacctgctgcagctggtccatgaagtcgtcgagtccgaactcgccttccgccatcttctgggcggccttgcgggcctcctcctcgtcgaactgcttctgcgcctgttcgatcagggtgaggatatcgcccatgtcgaggatgcgcgaggccatgcgatcggggtggaagacctcgaagtccttgagcccttcgccggtcgaggcgaacaggatcggcttgccggtcacgctcgccaccgacagcgccgcaccgccgcgggcgtcgccgtcgagcttggacagcaccacgccggtgaaatccacgccctcgtcgaacgccttggccgtctggacggcgtcctggccgatcattgcgtcgatgacgaacaggatttcgttggggttcacggcatcgcggatgtcgcgggcctgctgcatcagcgcttcgtcgacgcccagtcggccggcggtatcgatgatgaccgtgtcgtacagcttctgcttggctagcgcgatcgaatcgcgggccaccttcaccgggtcgccggaggtctcgcccggcgcggacacagagtcgcccccgtcggactggacgcccttctcgggcgcgtacaccggcacgccggcgtgttcaccgaccacctgcagctgggtcacggcgttcggacgctgcaagtcggcggcgaccagcagcggcgtgtggccggaatccttcagccagtagccgagtttgccggcgagcgtcgtcttgccggcgccctgcaggccggccagcatgatgatcgtcggcgggttcttggcgaagttcagcggccggtccacgccctggccgagcacatccgtcagctcctcgttgacgatcttgaccacctgctgcgccgggttgagcgcttcggacacttcggtgccgagcgcacgttcgcggatgcgcgcggtgaaggaacgcaccacgtcgagcgccacatcggcgtcgagcagcgcgcggcggatctcacggatcgtgccgtcgatatccgcctcggaaagtttgcccttgctcttcagatgcttgaacgcattcgagagccggtctgtcaaagaactaaaagcagccataatgcgaatcagtctagccgttgcggcggaaaaccagcgggttgccgccgaggcggcccgcacggcgacggagaggtgccgcggggcgccgttcggcggtcgcggctgcgcgtgggaccgacgtgagagagcggcggaaatgcgacagaaccgttggccttgtgggcggcggggattcccgcacgctcagcgcgaaccgacacgcccggaatcgttcgtttccgttaccatggaagggcaataatttccgtggattattggatcgctgagctgttttgattatccttcggacccaacctatacgcagactgccgcgctgacgccgacgcagacatgccgtgcaatatggaaggcccgcctatgccacaccagaaaaccatcgaacgcaaagccctgatcgtgggcatcgtcatcaacatcctgcaggtgctcgcaggcatggccgtgttcttcatgaccggtctgaaggccatgttcctggacttctccttcaccgccatctccgtgctgtccggcctcgtcgctgcatacctgtcgtcgcgcaccgtgcgcaccaccgagcgcttccccaatggcatgttcgctctggaaccgatatacgccatctgcaaggcgatgctgacgatgtcgctgctgctcttctctctcgtcgatgtgacgcgcgtcgcctatgactatttcgtgcttgggcagggcgggcgcatcgagaccgggcccgtggtgatttacgagatcctgaccgtggccgtctgcctaggactgtacctgtattaccggcgcgagaaccggcgcatccgcaattccagcacgatgctgaccgcggagtgcaagagcacgctggtcgacggttcgatgtcgttcggcatcggtgtggtggccgtgttcctgtggttcctgccggctggtggccctctggatttcctgcattacaccggtgatttcttcatcaccgtcgcactggtgctgctcacgatcaaggagccgttcggcgtgctcaaggacgcgttcgtggaactggtcggcggagtgcatgatgacgatgcgacgaacgcgttcgtggagtcggcggcgcagcggcatctgccgcagaacaccgattacgagcaggtactggtgttcaagaccggcatgaactatacggtcgatgtgtatctgagcggtatcgggcagagcattgacgtggaggatctggtggagtgcaagcgagacttggagaaggagctgaccaagcggctgcatatcgtggatgtcgatttcgtgttcgattaaggagcggaacaggatcggatgatcatgactgtcccgcgatgatgccggggcgttcctgctcggtatctgattgcatttgctggcataatgccagcgacaatgctgggctgctatcggcgctttcaccgtcaaaatatgctccgatcgcataaccgtaaccagttgagccccgctttgggggcggggctcaacataacggatcacacagtgtcgggggaggattacttcaaactccacgtgctgccttgcgggccgtcctcgatggcgatgccggcggcacccagcgcgtcgcgaatcgcgtccgccttggcgaagtcgcgggacttgcgcgcttcagcgcgggcgttcagctgctccgtgatcagggcgtccagcacatcatgctcgcggctctcgccgttgccgtccgcgcctgcggcaccggcccacggctcggccagcggatccagtcccagcgcatccagcatcgcccgcaccgcgaccagggcgctgcgcacctcggcgcgggccgcatcgccgtcggcacggtcatccagcttgctcagcagcgtgttgccgttgcgaatcgcggtgaagatcgccgccgtggcgccggagacgttcacgtcgtcattcatcgcggagacgaaatcggcgggaagatcatcggcgctgaccccggcgatctcggcgcgctcgggatgctcacccaaagccacgccggcgcgctcgatgaagttcatgatgcgttcgtatgcggcctgggcctcgaccagcgcttggtcggaccattcgagcatcgaacggtactgcacggagccgagcgcatagcgcaccacccatgcggagtgctcggccagcacactcggcacggacaggccggtgcccagcgacttcgacatcttctcgcccttggcggtcacccacgccgaatgcatccagcgtgcggccgactcgtatccggcggcacgcgtctgcgccatctcgttctcgtgatgggggaagcgcaggtccagtccgccgccgtggatgtcgaacatgccgtccagataccggtggctcatggccgagcattcgatgtgccagccggggcggcccacgccgaacggcgtcgaccagcgcgcgtcctgcgggtcggtgggcttcggcgccttccacagcgcgaaatcgcgcggatcgtgcttgtcgggggatgcgtcggcggggtcgatcggattgtacttgtcgtcgccggccgcatccacggacgggcccatgcggtcagccacggcggcggcctcgtcggcctcggcggcaccctgcttctgatgggtcagctcgccgtaatgcggccagctcgccacgtcgaaatacacgttgccggtcggcttgccatccgcgtcataaactacgtagccgtgaccgttgtcgatgatgcggcggatcaggtcgatcatgtcgatcatgtgcccggtcgcgcggggctcatacgtcggcggcagcacgccaagcgtgtcatacgcctgcgtgaactcccgctcgtagaagtacgcgcgcgcccaccactgctggcctgccgcggccgccttgtcgaggattttgtcgtcgatatcggtcacgttgcgcacgaacgtgacctgatatcccagccgcagcatccatcgccgcaccacatcgaacgcgacggccgctcggatatggccgatgtgcggggagctctgcacggtggcgccgcacacgtagatccccacctggccgggcctgatcggggtgaaacgcgagaccgtgtgcgaagccgtgtcatacagcttcaggccggccgcggcgcgcgccacgccggcgttctcggaagtgttggaattctgcggttctgaggcttgtgtcataatgtcgagcgtattcgcgttatacgacaaaccatcagacaaaccacccggcaaatgtgattgcgcggccgcccgggcgcggctggaaatacgaaagatgaagaaacggtgtgcaaagtttacgtaggtgatgcaacaatggagttatgacgcaatcgcaagtgcttatcgtgcagcacgtcccgtgggagaagccggggcgcatcctggacaacctggacgacctgaacatgtcgtccacggtggtgaacatcgccaaggaaaagaagcccgatctgcctgacttcgcgcaggtcgccggactggtgattatgggcggtccgatgggtgcgctggattatgacaagtatcccggtctcaaggtcgaggcgaaactggtcaaggcggccatcagcgtcggcaagccggtgctgggcgtgtgcctcggccatcagatcatcgccaccgcgctgggcggcaaactcagccgtggcgagtcgccggaaatcgggttcgcgccgatcaagcgcgttgacaagcacaattacttctcgatgtggaacaagcagatcgacgtgctgcactggcacaacgacgtggtggggcttcccgccggcgcccagctgctggcgcggtccgagcacaccaaggtgcaggcgttccgcatcggctcggcgctgggcatgcagtttcatctcgaagtgacgccgacgttgctggaggaatggctggatgagtcctcgatggtcaaggacctcaaggcggtgggcggatcgaagtcgcagctgcgcgaagcgttcgccgaatataatccgcgcctgcagccgttggccgagcaggtgttcggcggattcgccgcccgctgcaacacctacgcccaatccctgcgctagcgaactgcgagttcgctccccgctggcggggggcgaacatgacgagccagcgggggcgtatggtggttcggacgttgatgcccaccgctgacgctacattggtgagtcatgccgacttatgaccttggactggaacacgtttcactcgccttcgccaccaaaaccatcttcaccgatgtgacgcagggcgtattcgagggcgatcgcatcggcatcgtcggccgcaacggcgacggcaaatccacgctgctgcacctgttcaaaggcactcaggagccggattccgggcgagtcaccaagcgcggcggactgacgttcggcatgctcgaccagcgcgacccgctggacgacgacgccaccgtgcgcgcggccgcgctggaaggccgcgaggattacgagtgggccgccgacaacaagtcgcgcgagatcgtcgaggcgctgctgggtggcatcaacctcaacgcccgcgtcggctcgctgtccggaggccagcgacgccgcgccgacctggcccggctgctgctcaaggattgggacatcctcgcgctcgacgagcccaccaaccatctggacgtcgtgacgatccactggcttgccgaacatctcaagaaccgctggtcgaaagggcagggggcgctgctgctcgtcacccacgaccgctggttcctcgacgaggtgtgcgagtcgatgtgggaggtccacgacggcgtgatcgacccgttcgaaggcggctactccgcatacatgctgcagcgcgtggagcgcgaccgacaggccgatgtgcgagagacgaagcgccgcaacctcgcgcgcaaggagctcgcctggctgtcgcgcggcgcccgcgcccgctccaccaagcagaagttccatgtcaaggccgcgcgggagctcatcgccgacgtgccgcccatgcgcaacgccgtcgaactcaagcagatggccacgtcgcgcctgggcaagcaggtcgtcgacctgatcgacgtcacgcagatcttcgcgaaaagccaaggcgagcagccggtcacgccgaccgacgacacggcggcggatcaggcccccgcctcctcctctcagatcgatatcgtcccctccctatactcggagccgcgcgtgaccggttccgtcgaagtcgccgtcgacacgctcgccgacccgcgtctcgtggacgccggcgtgccggaatccatccaggccgcagcggaagccaaggcgaaggcggaggcgctcgcggaacgtaagggtgtcacggaggagtcggtcgcgccgcaggtcacctccgcggcgcagaagatcaccgtcgccggtcgcaagattctcgacgacgtgacctggctgatcggccccggtgaccgtttcggcatcgtcggcgcgaacggcgccggcaaatccacgttgctcaagctcatcgacggcacgctcacgccgacagccgggcatgtcaacatcggcaagaccgtgaagttcgcggtgctttcgcagcggctcgacgagctggagaaactcggcaaatacaagatcaaggaagtactgtcccgctacaagcccagctatatcgtcgacggcaaggaagtcacgcccggtcagctgatggaacggctcggctttgaatccgcgcagctgatgacgccgatccgcgacctgtcgggcggacagaagcgccgcatgcagctgctgctgatcctgctggatgagccgaacgtgctcatcatggacgagcccggcaacgacctcgacaccgatatgctcgccgtcatggaggatctgctcgacacgtggccgggcacgctgatcgtcgtcagccacgaccggtacctgctggagcgcgtcaccgaccagcagttcgcactgatcggcggtaaggtgcggcatctgcccggtggcgtcgacgattatctcgacatgatcgaaaaagcgaagaccgcagcgccggcaggcgtatcggcttcgcagaaggagccggccgactccggcgtcactgccacggcggacgatgcccccaagctcagcggcaaggaattccgtgagaccagcaagcgcatctccgccatcgagcgcaagctcgcaaagctggaggagcagaagaccgcgctcgaagcggatatggccgctcatgatccgagcgactatgaggggctgaacaagctcaacgggcagcttcaggccgtctccgacgagtccggcgccttggaggccgaatggatggaattgtccgaaaaactggagtaatcgcggcgcgcggcgcgtgaccttacttcatcatctcttcatagatgcgcttgcagtccgggcagacggggtattgcgacgggtcgtgcttcggcacccagatcttgccgcacagcgcgaccacgggccggccggtgagcttcgattcggcgatgcgatcgcgcgacacatagtgcgcgaaccggtcggcgtcgccattgtcggaacggtcggtctgctcctcggtttccggacgctccagcaccgccgtccctgtgccctggtccggggtggacagcggcgacaccggatccgcgagatccgcggcgatccctcctgcgacggcggatgtcggctttagctgtgttgacggttcagatgacatttcgactccattccttcatccatgacgacatcatagcggcgaatggccggcctgtcttccaccggcatggattcatgataatgctcgcatgctaccgctgcatgtccggcgtctgagccccggctcgctcgtatacggactgtccggcgattcgcggtaggctatgcatatgactatcgcagtatgcccaggatcgtatgaccccgtgaccgcgggacatttggatgtcattgagcggtgcgcccgtttttttgacgaagtgcacgtggtcgtggccgtgaacgccgcgaagaccccgatgttcccggcgcatacgcgagtggatatcattcgtcaggcgctcgaccacgacggattccccgatgtcaaggtcgcgtccacgaccggcctgatcaccgactactgcaaggagatcggtgccaccgtcatcgtcaagggcctgcggcagaacggcgattacgaggcggagctgggcatggccctggtcaatcgcaagctcgcagaggtggagacgctgttcctgccggccgacccggtgcttgagcatatttccagctccatcgtcaaggacgtcgcccggcatggcggcgacgtgaccggcatggtgcctgatggcgtggtgccgatgctggacgaggcgttgagccatgagcgtggcgagtgacgtcgcgacgcgaatcccatatgatattgtctgggttttccggtcgctgatacgtgaccggaataaaagtaaagagatgcagcatggatgaatcaacgaacgatggcatcgtcaacgtcggtgacggcaacgacggcggcgccgccatgaatcccgcgaccggcgccgagccggccgcgcagtcgaccgacgcctacagcgtcacgtatgcggccgcggcgcggctgaacgatgcgccggaaagcgcggcacctgccagcgtgtgggacgagatgtcgcacaagccgcagccggccgccgctgcgacgcacgagaacaagccggacatatccgattacgcgaagcagtccaagccgacgttcccgatcagtcagcttcccgatttgcgcgagacgctggatccgaaggccgacatgaaccccgaggaggtgaagtcccgcgaggagttcaccaccgtctatgacatcatcgactcgatggaggcgacgctggaggccgcgaagaccagcctgttcgcgcccagcatggtgcgtgtggaccgcgaggagttcgccggtcagctggacgagctcaagcggatgctcccggtgcagctggagcgcgcgtccgcgctgatgcgcgaggccgagcggcgcttggaatccgcgcagacgcaggcgaacgccatcatcgcgtcggcgcagagccgtgccgccgacacgttggacgaggccaacaagcaggcgcagatcctcgtcggccaggagaacatcaccgacaaggcgcggcagcgtgcgcgtgcgattctcgacaaggcgcaggcgcgtgccgaccatctgaccaatggcgccgacgagtactgcacgacggtgatgaccggcctgcaggagcagctcggcaagctcagtcacgacgtgcaggcaggactcaacgtgcttgaggaacggcagcgcgcggcgggcgagcagatgccgcacctgaacatcaacgattatccggaagcgcagtaggggcgcgccggagtgtaacggaacgcgcaacagcatgcgcggcagcagcagggaggagatttgcatggcacgaccggaggattccgcatgggcggtcagcgtggcgcaggtggcgtcgcggccggggcagtccaagacggtggacgcggtgtttcccgcgccgagcggcatcggcgatgaggtcatcggcgtgaaggagggcgcggacgtcagcgtgcacggctcgttcgactcgatagtcgacggcctggtgctgaccgctcgcatcgaagcgcccgtcgcggccgagtgcacacgctgcctcaagcccatcaagcgcgattggggtgtggacgtcgtcgcgttcttcccctacgaggagagcgcgaaggcccgctcgcacggcaagcccaagaacgaggacgtggagatcgtcgcgggggaggacgagtccgaggacgtgtatccactgagccgagacggggcgttcgccgacctggaggcgctgctgcgtgacacgctggtggaggcgctgccattgcagcccctgtgccgcgagggctgccggggactgtgctcgcagtgcggcgtcgacctcaacgagcacccggaccatcatcatgacgtgaccgatctgcggttcgcggctctggccgggttgaaggcccagctggaggccgaggagcacggcgacaagtaacggtgggcgatcggcgtgcgggtctgggaacctgctcgcgcgacgccgcgacatgccgttgtacgggcgatgcgttaagataccgtacgcttaagctcaattgttcgaacgaaacagaggaataacaaatggcactgcctaagtacaagacctcgcgcgccaacacgcactcgcgtcgcgcgaactggaaggctaccgccgcccagatcatcgcatgcccgaactgcggcgctccggcgctgccgcacatggcttgcccgagctgcggctcctaccgcggccgcgtgtaccgcgcagccattcgctccgctcacaccaagtgatcgcagccgaatgccgatagcgaaatgaagaccctgccatcgacgggtggcagggtcttcgtatattgtcgcatattgccatccggacactgcgcgtatgcgttcagggcgtgcgcgtgcggccggatacggtggacaaggagaaaaacatgactgaacctgaaccgcgcgaagagctgttctccgcgctgggcgtcaccatcagcccggatctgctgatacaggcgctcacccatcgttcgttctcgcacgaacaccccggcacatcgaactatgagcggctggaattcctcggcgacgccgtgctggaactggtatcgaccgagacgctgttcacgctgcatcccgacatgaccgaaggccagctggcgaagatgcgcgccaaggccgtttcggaggaggccctgtcggcgatcgcccgggacaagttgcacgtcggcccgttcatcctgctcgggcacggcgaggcggagtccggcggtgccgagaaaagctccattctgtgcgacatcgtcgaatcgctgatcggcgccacgttcctggagcacggcatcgaaggcgcgcgcaaggtcgtgcaccggctcatcgacgacacgttggcggaagtggccaccgaaggaccagccctggactggaagacctcgctgaccgtgaaggcgcacgagctcggcctggatgagccgcggtaccgcatgagcgtgtccggccccgaatacgcgcaggaattcaccgccaaggccaccatcggcccgaaagacgacatcatcggcaagggtaccggcaccagcaagcgcaaggcgcagctcgtcgcggcggaaatggcctggcatgagctcgaccggtacgcgcccgcgctcaaggcggcccgcaagaacggctcgtccaagcaccggcgcagcggctcggccggcaactgaccaactggtgaacggcgattgcgcggtgctgtcacctgtatgcttaaactgagaaaatacgaatcacagacgccatagccacaagcgaacgcgcatcgtgaccgtcggcgcacgcaagtcatgaacgctcgcgaggcgcgacgggtccaggcatatgaccgaacgatttgagttgagaggacatgatggctctacccacaccattgcaggcgttcagcggcgttccgaaaaacaccgcatccgcagacaagcagacgatcatcgacggtgagaaaatgaccggcgcgcaggcgttgattcgcgcgctggaggatttgggcgtgcaggacgtgttcggcctgcccggcggcgccatcctgccggtgttccacgcgatcaacgacgatacgaagttccggttcacgctcgtacgccacgagcaggctgccggccatgccgccgaaggctatgcggtggcgacaggccgcgtgggcgtgtgcatcgtcacgtccggcccgggcgcgacgaacatgatcaccccaatcgccgacgcgaacatggattccgtgccgctcgtcgtgatcaccggtcaggtgggcgtgaacgccatcggcaccgacgccttccaggaggcggacatcgttggggcgacctatccggtcgtcaagcactcgtatctggtgacccgcgcacaggatatcccccgcgtgctcgccgaggcgcactatatcgcccgttcgggccgccccggcccggtggtcgtggacctgaccaagaccgcgcagaccggcgagatgtattattcgtggccgcagcgcatgattctgcccggttacaaccccaccacgaaggcgcacggccgcgtgatctcggatgcggcgaagctgttcgcgcagtcgtaccgtcccgtgctgtacgtgggcggtggcgcggtgcgttccaacgcgtccgccgaagtggccgagctggccgaagtgaccggcgcgccgatcgtcaccacgctcccggcccgcggcatcgtgccgaactcgaaccccaaggcgcttggaatgctcggcatgcacggcgccgtcgccgccaccgcggccgcgcagcgctgcgacctgctggtcgccatcggcgcgcgctttgacgaccgtgtgaccggcaagctcgacgcgttcgcacccggcgcgcgggtgatccacatcgacatcgatccggccgaaatcggcaagaaccgcgctcccgacgtgccgatcgtcggcgacgtgtccaccgtgctcaacgacctgattcccgaaatcaagcgttctcaggccatcggcggcaagccgaacctcaagccgtggtgggacgagctcaaccgcctgcgcgaggaatatgccatcgattacgatcagccgtgcgataagccgaccgatggttcgctcgcgccgcagtgggtcatcaagcagctgtccgaccatgccgacccctccacgatctgggtgtccgacgtcggtcagcaccagatgtggtcggcccagctgattgatttcgagaagccgcattcgtggatctcctccggcggcctcggcacgatgggcttcggccttccggccgccatcggcgcttcggtcggctcccagcgcgacttcaaggggcgcaagccggtgtggctgatcgcgggcgacggctcgttccagatgacttccgaagagctgacgaccgcgttcctggatcatgcgccggtgaagatcgccatcatcaacaactccgtgtacggcatggtgcgccagtggcagactctgttcttcggacagcactactcccagaccaacctggctgacggcgattcgaaggaaggcggagagttcttcgacgtgcctgatttcgtcaagctcgccgaggcgtacggctgcgtcggccttcgcgcgttcaccgaggacgaggcgattgacgcgatcaacaaggcgaacgagatcaacgaccgtccggtgctgatcgacttccgtgtatggaaggacgccatggtgtggccgatggtggcagccggcgcgtccaacaacgaggtcgcgtatcgtccgggcacgcagccgctgctgcacaagggcgtcgacgatggtgaccaggcgtgacggcacggttgtcaaggaataaggagtaagtgattatggctatgtatcccgcttcccgcctcggttccgagcgtcacacgctgtcggtgctcgtcgagaaccgtcccggcgtgctggcccgcatcgccggtctgttcgcccgtcgtgcgttcaacatcaactcgctgtccgtctcgccgaccgagcgtccggacatttcccgcgtcaccgtgaccgccgacgtggaggccgtgccgctggagcagatcatcaagcagctcaacaagctgctgcacgtgctcaagatcgtcgaactcgatccgaacaccactgtggagcgtgaactggtgctcatcaaggtggcggcgaacgagtcgaaccgttctgacgtgctggagatcgtgcgcctgttccgtgtgcgtgttgtcgatgtgaacccggagtcgctgaccatcgaggccaccggcgccgaaggcaagatcgacgcgctgctgggtctgttggagcactacggcgtgatcgagctggtgcgttccggcgcggtcgccgtgacgcgcggtccgaaggcgctgagcgaaaaggtcatcggctccgagattaagggccgctgatgcggtatcggcgtggccgagcatgacattgccgggcgggttctttcccgcccggtttttgtttttgcggtgatgcccatcggtgtagcacatcgcgcggattccccggaatcttgaagaaacggcgtctatcgcgaaagcggacattgtggaacatgccgtgcgaaatatgaaataatggcggggaagcgttgcaggggatcgatgccatcgcacagtctggttccgcacaatcaggttcgatacagaccggcacatcaccgttcgccatgacagcgcaatccaattcatcgcaatatgagccactggaaccttacgatacgatgacgggcactgcgattgccatcagcgatgccgacgaggccgaagccctatccgaatacctgacgtcccccgaccgccagcatcccgcggtagtggtgacccgtcgcttcggcaagcccctgttcgacgcgaacagcctcgcctcgaatctgcatgatgtcgccgccgtattcgacctcgtcaccccgaaagcggcgtggggggggctgtcggcagccctgccggaaggcgccgccatgacgcgcacgcaattcgactcgatgcaggagctcgtcgaatttatcaccgacgacgacggccatatcgacgagtccgccgccgacgaggtgttccagtacctcacccagctgcaggacgaggcgcggcatcttcgcgagggcctgaaggtctccaacggcaggttggagagcatgaagcagaagatgatgcagaagcagcgcgagaactcgtacagcgacggacgccagtactacaagtcgccgctgccgctgttcgccgacaaggcggagggcaagcggttcgagcgcgagcagatggacatgctggtccgccgcgaatgggccacgcggtgcggtccggaagagaagaagagccatgcgctgccgaggacatgggcgtattccgactggttcttcgacatgctggcatccacacacatcagcgtcagcaaggtggtggccgtgatggtcgaggtgctgaccgggcttgacatcgagctcgcagggccagaaggattacagcacggtgatttcggtggggattaccggctcgcctttcatcaggctttgcgcggtgatcggcagttcgcgcagggccttggcccggtattcgtgcgcgtcggcgatggcggcgtgaccctgataacgtgaatcgatgtcaccgtggtcgacgtagtcgaccagcaggtccttccatccctcagccggacgatactcggccagctgggtttccgatccggagatcacatgttccgtctcggccagaccatactcatatgaacggtaggcgagcttgcggccgggaacactggccttgtccttcgacttcttcgccacgggctgcatcacgccagccgaattctcgcgctcggtgagcttgtacaccatcgcgcaggtcggggcaccggagccggtgaccagcatcgtgcccacgccgtacgagtccaccggcgcgctctgcagggcggccagcgcgtactcgtccagatcgttggtgacggtgatcttcgtgttcgtcgcgcccagggcgtccagctggttgcgcacgcgctgcgccatggcggccagatcacccgaatcgatgcgcacgccgcccagctgaggacctgcgacctccacggcggtcttcaccgcctcttcgacgttgtacgtgtccaccagaagcgtggtgttgcggccaagcgcctcgacctgcgaggcgaaggcgctgcgctcatcatcatgtacgagcgtgaagcagtgcgcggcggtgccgatggccttcagtccatacagctgcgccgcaagcaggttcgctgtgccctggaagccgccgatgactgcggctcgtgcggctgccaccgcggcccactcgttggtgcggcgcccgcccatgtccatgcaggggcggtccttcgcggcgctcaccatgcgcgaggcggcggatgcgaccgccgaatcatagttcagcacgctcagcaccagcgtctccagcagcgtgcactcgccgaacgtgccctcgacctgcagaatcggcgaattcgggaagaacatctcaccctcgcggtaacccttgatcgaaccggagaaatgcaggttctccagccacgaaatcgtctccttgctaaccaccttgcggtcggacaggaaacgcaggtcctcgtcgctgaggaggaaccgacccagctcatccagaatgcggccgatgcccgccacgacgccgtaacggcggccttcgggcaggtggcgcgtatacacctcgaacacgcatttgcggttcgccgtgccatccttcaggctggcgtccagcatcgtgtactcatacatatccgtcatcagtgccggtgaataatcgaccatgaccgccctcccgcaagacaagaatcgtgtgttattcaaaaccctagtgttgcgcggcgactcgcgcaagagccattcggcgtgacggcggtcacgatggctgctgcagcggcggcgggagacgtgccgcgctgcgggcacgttcgccgcatggtgctacgttgaaggcatggctgaaatcaaagacatgttggacaaggcaatggtgattcgcgcggacggccgcgtagtggacgaactgcgcccggtgcgcatcacgcggcacttcacggatgtgcccgaaggatcggtactcatcgaatgcggcaacacgcgcgtgatgtgcacggcgacgttcacgccgtcggtgccgcgctggcgcaaggattccggactcggctgggtgaccgccgaatattcgatgctgccgcgagccaccgccgagcgcaccgaccgcgagtcagtgcgcggcaaggtcggcggccgcacccatgagatcagccgtctgatcggccgctgcctgcgcggcgtcgtcgacatgaaggcgcttggcgagaaccagatccagatcgactgcgatgtgctgcaggctgatggcggcacccgcaccgcctcgatcaccggcgcgtatgtggcgctggtcgacgcgatgcgctgggctgagcagaagcgccacattcgttcggccgaccgcgtgctcaaagacgccgtttccgcggtgtcggtcggcgttatcaacggcacgccgatgcttgacctgccctacatcgaggacagtcaggcgatgaccgacatgaacgtggcgatgaccggatccggtgacttcatcgagatccagggcaccgccgaacaccgcccgttcaaccgcgccgaactcaacacattgctcgacctcgccgaaaagggcaacaaggagcttcaggccgcccagcgtgccgccctctcgctcgattgaaacgagtcgggcacgccgccggcgggcgatcggcctcaccccgtcatgcacaaccataggtaaggaataaaggacccccatgaaactcgtcgtcgctacgcacaacgaaggcaaactcgttgaaatccgccgcattctcgaagaggatctgggcgcggacgccgctcaggtggagcttgtctccgccggcagcctcggcctgcccgacccggtcgagacgggcgtcaccttccaggagaacgcactgctcaaagcgcggtttgtggccggtctcaccggcctgccggccatcgccgacgactccggactgattgtggacgtgatgggcaacgcgcctggcatcctgtccgcgcgctgggcgggggagcatggcaatgatccggcgaacaacgcgttgctactcgcccagctctccgacatcccggacgcggcgcgcacggcccgtttccgctgcgccgccgcactggccgtgccggattccgcggctcctgtggcgggcgggaggcacgccatcgtctccgaaaccgtcgaaatcggcgaaatgccggggcgcatcctgcgcgcggcgcgcggcgagcatggtttcggctacgacccgctgttcgtgccggacgaccagccggagcgggccgctgcggaccatccgctgaccagcgcggagatggacgcggcggaaaagaacgcgatttcgcaccgcggcaaagccatcagggctctcgtgccggcggtcgaggcgctgttgcggtagaatcacgctctcaaaactcgcagatacaaaaacgggtttttgcggttttccgctattttccgccgtttccgcgaaatcggtgaaatcgtatctgcgagttttgagagcgcatgttcggcactcacgcgggaatcacgaaattcacgatggtcatcagcacgattgagatgaccgcggtgatggacagcgtgaacccggcgagcttcgcgttgccgagtacgcggtcggtgaacagtgtcgagaacacggccgtgggcgcgagcgacagcatcaccgccgtctttcgcacggacgcatcgaacggcagaaggaaccagcaagcggccgcgaacagcacgccgagcggcaagcgccaaccgagcacccacagcacgctgccgacatccttgccggtgcgcggcaaatccatcagcatgcccaccatgaacaccgagcagaacgagttcgcgtccgccaccggctgcagcagcgtcggcacgaacgccgggatgtgaatgctgaagatcatgaccacgatcatcagcagatacacgttgaatggcaccgaagtaaggaatcccttgaggatctgcttggccttcgcgcggcgggcgagcctgcgggcgtctttgtcccgtggcttcgaatagggaagtgtcggcgcggctcccgcatgctgttcggtgagcggccggtccatgtcgatgtgcagcagcgacgtcgtcatcacgtttgagccggcggtcacgatcacggaattgccgatgtcgaacatcgaggcggtgaccagcgccgaaggccccatgaacgcctggattacggggaagcagaaattgccgatgttgaatccggagcagttgagcatcaggaacgcgcggtccgcgacgggcttgtgccgggtcgccgcatacaccagcagcagcggcagcaggccgaagacgatggcgaacaccgagatcagcagcatgctcagatgatgcgggttcgtggcgaacgagacgatgatggaggcgggaagcgtgaaatcgaacaccaccacctgcatgacgcgatagtcgcgtggcttgaacagtcccgcccgcttgaccagatacgcagcgacgatgatgagcagaaacgctatgggtttcagtatcgcggtcatgcttctctattccctgtggcgattgcggaggtatggttccgcgtgcgcgagaagggacttgaaccctcacgtcaaagacacaggaacctaaatcctgcgcgtctaccgatttcgccactcgcgcgtgccacccgtcgaaacggctggatatacaaaaccctaggcgcggagcctaggggtatggagccacttgacagaatcgaactgtcgacctgctcattacgagtgagccgctctaccgactgagctaaagtggcatgctgccgattcgttgatgaacctgcgcacaagaatgagactttactgtatgccgtggatttatgcaagttcggctggcatgtcgtgcgcgggcatgtcgtgtcggtcacggttgttcatcttgggtattttttgtttgtttctgtccgcttttgtgagtatcttggtaagcgaagtaaccggtgtggcccgccagcattggagagccgactccggcgtacagtgatgatgaaaggaccaataccatggccatcaatccgccagttgacgccaccaagacccccgagtgggccgcgctgcagaagcactatgacgagctgcaggccgagggcgtcagcctcaagcagtggttcgccgatgacgccgagcgcgtcgacaagctgtcgttcgacgccggcgacctgcacttcgacctgtccaagaacctgatcaagccggagaccctccagctgttcgccgacctcgccaaggccgtcaagctcgacgagcgcaccaaggcgatgtacaccggcgtgcacatcaacaacaccgaggaccgcgccgtgctgcacaccgcgctgcgccgcccggtcgaggacgagggcaagtacatcgtcgacggtcaggataccgtcaaggatgtgcgcgaggtgcttgaccgcatctacgccttcgccgacgaagtgcgttccggcaagtggaccggcgtgaccggcaagaagatcgagaccgtcgtcaacatcggcatcggcggctccgacctgggccccgtcatggtgtacgaggcgctcaagccctacgcggacgccggcatctccgcccgttacatctccaacatcgaccccaacgacctggccgagaagaccaagggcctcgacccggagaccaccctgttcatcatcgtctccaagaccttcaccacgctggagaccctgaccaacgcccgtgaggcccgcacctggctgctcgaagagctcaaggccaagggtgccatcgacggttccgacgagaagaacgccgaagccatcaagaagcacttcgtcgccgtctccaccaacctggagaaggtcgccgagttcggcatcgacccgaacaacgccttcggcttctggaactgggtcggtggccgttactccgtcgactccgccgtcggcacctccctggccgtggtcttcggacctgcccgcttcgaggagttcctgcacggcttccacgagatcgacgaatacttcgccaacaccccgttcgagaagaacgtcgtcgtgctgctcggcatgctgaacgtgtggtaccgcaacttcttcaaggtcgcctcccacgccgtgctgccgtacgaccagtacctgcaccgcttcccggcctatctgcagcagctgaccatggaatccaacggcaagtccgtgcgctgggacggcaccccggtcacctccgagaccggcgagatcttctggggcgagcccggcaccaacggccagcacgccttctaccagctgatccaccagggcacccagctcatcccggccgacttcatcgcgttcgtcaacaccccgaacccgaccaaggacggcgaccaggacgtgcacgagctgttcctcggcaactacctcgcgcagaccaaggcgctggcattcggcaagaccgctgacgaggtccgcgccgaaggcaccccggaagagatcgttccggcccgcgtgttctccggcaaccgcccgaccacctcgatcttcggtgtggctctgaccccgttcgcgcttggcgagctcatcgccctgtacgagcacatcaccttcgttgagggtaccgtgtggggcctcgactcctacgaccagtggggcgtcgagctcggcaagcagctcgccaagcagatcaccccggccatctcccaggacgacgacgccctcgccgcccaggacgcctccacccagtccctgatcaagttctaccgcgccaaccgcgagttctgatctctgctcctgcgtcgcttcaatcagaactcgcggttggcgcgccgcgctgtgttgtttgatggtcggtctggcgaccgtccatggcgcgagttctgattcgtcggttcggctctagcagctgaactctgatacgcatgtgccccggcatcttcggatgctggggcacattgctatatattccatgcgacgttatatctatgacctgtgaactggggtggtgttccgggtcaatgagatcagccgtgggaaaccgcttcattgcagtgttccttgcattttcatgcgcactctttggggtaatcgatacattttcatgaggaccttgtatttggggtgtcgggatatctgtgattgaccacccccccccagtctcgcttcgctcgacagtccccgggcttaacatcgtgggattggcctagcggggttgtgttgtggctgataagatggcgtcgattatgtcggattgggattcgggcaatgggagatggtggtgatgaaggcgcagaagagttgggatacgccggtcgccgatgagacccgcgatgtgagcgatgcctccgaggacattcacggcatcaccgatgacatcaccgacgacgccgaatccgccgaggtcgatgccgaggccgtcacactgctgcgcaaacggcaccgccggatgacgctgctggtcgtcgtggtcatcgtcgcatcgctggtgagtggattctgctggcggcgcagcctccagaccggctcccctgtcaactgttcgcaccagaccggagtcgcggacgagaaggactactgttatggcgggttcaagccgttgcagccgtccggccctcagctgggccgatcccaggccggcccgtatttcgcaaaggcggtgaaaggcacggccgcggcatacgacgccgtgcgcctcgccgcggtcggcggcgacaaggatgcggtgaacaagtccgccgccaaggcccgtgacctctcgcaacaggcggcggagaccctcgccgcccgcacctggccgaaatcactgaccaagcagatccgcatggtcatcatcgaatatcaggagcgcgcggcgatctataccaacctcgccggcaaccgcaacggcgaggcgatcgactggatggtgttcggcgaattcaggccatccggagcgcagcaggtaatccgcagcgcgctgaaactgcccgacgagccggagacggccgtcccgttcgacatacgggacattgccgacggcggagcctgcaagggactggagaccaccaaggacggcggtcagcaggaagtcgaccggcactgtttcaccgtcaccgtgaccgaccaggtcccggccgagataacggggctgtccatcaaattcaatcttctgagcgaagacggcaccatccgcgagaccggcgtgagggccagctccgacatccagttcgatgacgatggcgacatcatcgagcacggcggcatccataagggggacacggtgaagctcaccatggaaatcgacccgaaactgctgcgcggcggcgaccgtttcgtgccgtcggcatggtatgtggaggacaaggcgggggagcagcacctcgcatcgttcactgcggtccaatcaggcggctatgacgtgctgaacgcgttcaaggtcaggtgacggcaatgtcagaacatgatttcgacggcgacgatgacatcttcagcaagtccggccggttcggcgggaacgccgagaaacgcaaggaccccgccaaaccaggcggcttcgggaaatccggcaatgcggggaagcccaaggactccaccgcatcttcggccggcgaaggcgacgcggaggcgatgcgccatctggagcacgagttcgccgcgatcgaccgcgaatcgcatcgcacggtggccgtcgtgttcgcggccatcgcggccgtggtggcgttgatcttcttcgggctccagatccgcgacaaaaccacgctgctgatattccatgacaacccgccgatcggctacctgccggtcagtgaatattcgctgcgacagccgtccacaggcaagccgatcagctcggcgcgcacatggcattaccccagccagtacacgattctcagcgacgacgccaccagcagcggcgtcaagcgcggcgcacggtgccgtatcgacaagagggattgcgatcatgcgctggtcacgtcccgcggcgtccagccgggcgacagctggggcgacttcgtgaagcgatacagcgacgtgaccgcgtacgagataacggtcgacgacaacgagagtggccgggacgattcgtacatgtccgatgaggaccaggccgcggcgtccgacctgcgcgagcaacacgggatcaccatagacgatttcgaccgtgactatatacagaccggcaaggtcgacctgtcccggaaccggctgaccgtcaggttccgggcggtgctctacgacacgaccgtgctgtacaccgaggccgaccagtggggaggctatctcgactccacccaggaacggcattggcgtatcggtggccggtacggcacgatgttggcgccgaaccggcagagcttcaacctggaattcgagttcgccaacagcgcgacatgggaagggctgggcgatggtgacctgatcagcatctccagttcactgtacaactagcgaggttatgcatggcaaggttacacgacagtcggcacggttccgatgcggacggcatcgatgacgacgatatgccgctcacccatgagcaggccgtcgtcgaagccgacgccgaactccggcgtatgacttaccacccggtgcgcaaggcggtgggcatcgtcgtggcgatgggcgtcgccataggcgcgtcgctgggtgtcgggtatatgttcggcggcgatccgggcggcatcgtgaccgcgatcacgggcgtggtgtgcccgcaggacgccaaatacgccctggacggcgacgcgccgtttgtcaacacgtccgacacctcggagcatcccgccaagggggccaggctcagcgagaaggacgcggggcagtactatctggaagccgtcaagccgtcgatccagccgttgcgcgacgcgatgaacaccttgtacggcggtgatctgaaggccacgagggccgccgcgggaaaggccgccaccgtgctgcgcgccaccgccaaggcgctgcggtcacgcacctggcccgatgaggtcgccaatgcggcggccgtcgtcgccaacgaatacgacgccaaggcccggcaggcctcgtatgtcgccgactcggtcacgccgtccgccagcgacgagctgatctcgctcgatgcctacggcgtcagcgaagcggatgtctacctgcgcggcaagctcgggctgcccgccgccgaggcgccgtccgcgccgctggagatcacgggcatcgaggaccggggcatccagcagggggcggataccggcgggtcgaccgtggacaccggaaagcgcatcatcgccgtgaccgtgcgcagccacgtgcccggcacgctcagcgggctgaacctgacgttcgatctcaagaagggcaagacgacgctcggacgcatcagcggaatcatggacgacatcgcgctcgccgaagggcaatccatcgtggttccggtccccgtcgatatcggcggggacgacggcgggattgccggcgccaccatgagctgggacagctggtcgttgaccgattggcgcggagaaagccatattgcggcggccagcgacgacttcgccgaatacgccccggacaaggtgatgggtacgttcacattgcggtagacgccggggccagaagcccgcgagcgaatttgtggtgaaggatacaggctccacaacatggcggactcgtccgctatgacaggaacacaggaatcgccggtccatgactcattctcgtcatgccggggattcaaatagccgatgaaggagcaggaaggttcctatgcaattcaagaaactcatcgccggcgtcgcggcggttgcggctgccttgggcggcatggccttggggaccatgacggtcaatgccgataccgatacgctcacagtgcccgaaacggccacgccgtcaaccattaccctgaacaaggccgatgatgccgatacatcgaaaagcacgtatacggcatatcgtatcgccgcgtacatcgacccggtcgcgaatgccgacgggcaagctgacttcctttggcctgaaggccgtggacagcgacaagtgggacggcaacattcgcgaggccatcgccgtggccggcaaggatgggcagaagctcgtcctgctgtacaacgccgtcgtcgccaaagccgccgtcgacgatcaggtgacgaactccgcgaccgccaattacaatggcggcgccgattccgaggccgccaccacggtcgtcaagctgggattcttcaccatgaagaagatcgacaagcagcacaacggcatcggcggcgccctgttctctgtcagcgacagcggcggcaacgccgtcgtcttcgagaagggctccgctaacggcagctgggtccgtgccgccgaccagagcgtcaaggtggacaacgtgacctacttcacgagtattccgaccaacgcaggcgggctttcccactggcgagccacgcggctgatcattcgcggcgggcagattcatgacgcggattcatgacggtcacgtttaatccacggcggtgatttgctcggcatcccatttgacgccgaggacctcgggcgtggtgatgactgtttcgatgctgctttcgatgtcgatgttgctgctcatgtgggtggcgacgacggtggtgatgaccaccagatcatcgggaagatccgaagccgcgatggactggacgatgaaaccgggctgatgcagggcgttgaacaccagcgcgcggatggcctgctcgtccttacgcaggcatttgacctcaagggtgtaacggatgccctcggcctcatgcgattgcgcggtgcgccgggcgtcgatggccgcgccgatcggccggagcatcatgttggcgagcatgatggcggtggccccgattgcggcggccgcttccatgccggagccgcacaacgtgccgaccgccgccgacgcccatagcgtggccgcggtgttgagcccggacacggacacaccctgcttgaggattacgcccgcgccgaggaagccgatgccggacgccacctgcgcggccacgcgcgtggggtctccggtgccggccgcgagcgtatagacgccaacagtggtgaacaggcaggaacccaacgacaccagcgcgttcgtgcggatgcccgcgctgcgtgcgcgcagctgccgttccaatccgatgagcgcgccgagcccgatgctgagcaggatgcgcagggttatggcgaacacctgtgatgtgacgattgcggtccagactgtcatgatcagttccttcgtttgaatggatgcgggagacggtggtggtacggggagaggatgataacgcgggggtgcccgcccggcgctcctgcggattccatcggttccgcaggagcgccgggcggtcagaagtcacagcagcggctgctgacggtgcagatacagggttctgacggcaagtaccgtcacggcataaccggcgatgacgatggcgagcagcgcgaacagcgacaccggaggtacgtggaaacccatccatgcgccgaccggcgtgaacggcagcgccgtggcgatagtcagcgccgcgagcgacgtgcagaccagcggcaccgacgcgcggctcccgatgaacgggacgcgttcggtgcgcagcatgtgcagtgccgtgatctgggtccacatcgacacgacgaaccatcccgtctggaacgcggcgacgaacagcagacgcgacccatccccgtgcagctccgggaacctcccgcctgcgacggccgggcagagcagggtgagcaacacggtgaaggtgaccatatcgaacagcgagctcaccggcccgaagcgactcatgaaccgggcgatagacgccgtgtcccaccgggcgggggagcgcaggacatcgccgtcgacgcggtcccatgggatcgcgagacaggccaggtcgtatatgaggttcagcagcaccatctgcacgggtgccatgggcacgaacggcaggaacgcgccggcgatcatcaccgagatgatattgccgaaattcgagctcagcgccagcttgatgtacttcatcatgttgacgcaggtgcgcctgctttgcgtgatgccgcgcagcagcacgtcgaggttcttgtgcgtgagcatgacatccgccgactgtcggacggcctcggagccggtgctggcgctgatggcgatttcgctggcgtgcatggccggcaggtcgttgacgccgtcgcccatgtatcccacgcaatgcccctcgcggcgcagcagtgagacgatacgcgccttatgctcgggagtgagcttggcgaacacgttcacgcggcgcagttcggtgccgagcgcggtgtccgtcatgtcgtccagcgttcggccggtgaccacccgtcgagcattgatgccgactttccgggcgacggtacgggccacttgtggctcgtcgccggtgagcatggtcacggtgatgccggcattgtgcatgtgggcgatcgtgtcggcggcatcgggcttgggcaggtccaggaaagtgaggtagcccagcagggtgagcgcgcggtcgtcctgcactgtggtctggtctgtcacagagcgctgcgccacgagcaggacgcggtatccgtgcgtcgccttgtcggccatcagccgctcatatgttccgcgcagtcgatcggtcagcggctctgcggttccattgcgcatgacggtgtcgcagcggggcagcatttcggagacggcgcccttgacgaccatgatgcggctgacgttcccggacgttccggcgccggcgccgctggtctcactgatatcgctgccacctgtgtgctcgcggtccgcgcggtgatggctcttcgcgacgatgacggtcgcccggcgtcgtatcggatcgaaaggcgtgcctccctcgacctgtacgtcgccggtatcgtttgccgagtcaccttcggctgcgacgatggcgtcatcccacggattgctcgtcgtgtggggaatcagtgtggtcagccatgccgcatgcagcacgtaggacgagttcaacccgctcatgctctgcgcccggtcgagcttgatgacgccgctggtaagtgtgccggtcttgtcgacgcacagcacgtccatgccgcccagcgtctcgatggcgtcgagccgcctgacgatggccttgccggaggccatcgtccgcgcgccccgggacaggcagacggtgacgatcagcggcagcatctccggcgtgagccccaccgccacggatacgccgaacagcagggcctgcagccagtcgccgctcgcgatgccggtgaccagcatggacacgggcacggtgaccgccgtgaacgccatcagcatccaggacgtggagttcatgccgcgctcgaagcgcgtgcgcggccgctgccattggaacgcgcgtgacagtccgccgaacagtgcgctgcggcctgtggcgatgacgactgccaacgcggaacccgaaatcaccgtcgtgcccatgaacaccaggcacgccgcgtccgtcaacgcggtgtccctggcgccggcggcgagcagtgcggcagcatccttgcgcacgggcatgctttcgccagtgagcgccccctgcgcgatgcgcaggtcttggctctccagcagcttgcagtcggccgggacgatgtctccggcggacaacgtcacgatgtcgcccacgacaagctcttcggacggaatctgccgctcgccggcaccgacccgccgcaccgtcgccgtggtgctcaccatggtggccagcgccgtggcggcatgcgagcttcgggagtcgtgcacgtatcggatcagaccggacaccaccgccatgagcaggatgatgcccacggtcaccggcgtgccgcctccgttcgccgcagtggtgcccgaagtcacgattccgcgctgggccagtgaacacacgaacgaggtgagcgccagcaacatcagaacgccgatgaacgggttcatgaacgccctgaccagccgccgcgccggcgattcatggacgtcgggcgccggtatggtgttgccgccgtaagcccgacgcgcctggcgaacctcgtcgggttccaagccggattcgtgcgcatacaccaaggcgagcgtggcctctggcgtggcatgggcggcgaaattcagtcgctgggtgatgctggcgtggcgttcgccgcgccagcgtatcagtcgtagcgtgttcatgattcctccttggcgattcggggcggtccgttccgctgtcgggttgatcgttgtttccattgtggcggttggctgaggcgggtcaactcagtccgtttcgctggcttcctcggccgctcgggtggcgtttgccgggttggcggcgtcgacggtgatgatgtcgtcatcggcgtcgtagtcgaacagttctccgtatcgaccccacgtcatggcgatgttgaactggcgctccgcctccgcgtccgtatgacgggccctcagcaggtcgacgatgagctcgccgcgcaggcggccgtgttcgctgtgacggaccgctcggtcgatgatgcgcaccagcggtgccttgtcttgcagcatggcggcgaacatcgtcttgcttgtcagaatgtccgcctgcctccactggcgtccgagcttggtcaatgtcacgtgtccgttctcgacggtcagtaatcccagcatggttccggcgtcgatcagcgggaacaggtcgtccacctcgaatgacagctcggcggccagatcggccaggtcgatgccctgcgcgtgatcgtatacgatctccaccagtccggccaggcctcccggcgtagcgttgggcagcatgtcggaggatgcctgatggtcggcgtcgctcgcccgggccggggcctgatccgctgccgcggtctggttcgccgcgccatctgacgtgccatgcgcgacgccgtccccggcggccgtgcgctcgtcggcggtatccgccggcccgccatcacgactctgcccggtcaggatcgcatacagggtgtcgaccatagcctcgaactgggcggaatgacggtcgcggggcctcggcagggtgacgggcatgtcggcgatgagatgaccgggatgcgagccgagcaccacgacacgatccgccatctgcacggcctcctcgatgttgtgcgtcacgatgagcaccgacttgatggaacgctgattgccgctccacatcttgagcacctcgttgcgcaggttctcggccgtcagcacatccaatgcggagaacggctcgtccatgaacagcgcatcgggctgcaccaccagggcccgtgcgatgcccacgcgctggcgcatgccgccggagagctccttcgggtacgcgttctcgaatccgtccagtccgatggcgtcgatggcctgcagtgcagcgcgacggcgctcctcgcgcggcacgccgcgggcctccagccccagttccacattcgcttgcaccgtgagccacggcatcagcgcgaaggtctggaacacgagtcccactccgggattagggccggtgatgtcggtgccgcggtaggtgacggtaccgctcgacgcgggtaccaggcccgccaggatgcgcaggaacgtggattttccggcgccggaccggcccaggatcgccacgatctcgccctcatgcagggtgaaggagatgtcgcgcagcacggtcagctctttaccgcgctcggcacggtaggtcttgcccacgtgccgcgcctcgatgatcgcggtgccggcggcgttcgtcgcggcggtctgcgggaaggttgcggtgtggtcggaaaaagttgcgatggtcatgataaatggtccttgctgttacgttttttgcggatgatcgcggcggattcgaatgacatgcgctcgccgccgatgctgttggattgttgcgggtcgatgggccgggacggccggtgcggcctccgtcaggcgacggagaaacggcgctcggcgtacgcctgcaatggacgccagaacagccggttgacgcccacgacgaacacgctcatcacggcaaccccgatgatggtcttgccggtgtctcccaccgcggtcgcattggcgatatatgttcccagtccatttgccgtaagcgtggtgtgcccgtaggtcacgatctcggagacgatggaggcgttccacgcgccgcccgccgcggtgatgccgccagtgcaccatgagccgaacaccgccggcaggatcagcttggtccaccgctgccgcgtgtccagatggaacgcccgcgtggcctcgcgcaggtcatcgggaatggccgaagcgcccgcaatcacgttgaacaggatgtaccactgcgttcccagcgacatgagcagaatgctgccccagctgatgtcgatatgccaggcgatgaaccacagtgtgacgaacgggaacgtgaagttcgaggggaagctcgccaacacctgcaccagcggctgcacgaaccgggaaatccgcggattcatgccgatcttcacgccgatcggcacccagatgatggagcacaccacggtcagcagcgtcacgcgcatgaacgtgatcagtcccaggaccatcgcgtggccgacctcggcgaacccctcgccgtccgagatgaaacgcaccagcatccacaggccggccaggcaggccacagccatgagcgccatgaacgcgatgtcgagcgtgcgacgccgggtgccggcggccggccagcgtgcgccggtacggcccagcgggcgggtcagccagaacatcagattggcgatgggccggcccacgagagccagcgcatccgaaatgccggaacgccgcagaaccgacagcaccagactcgtcttggcctgcacggactcgttctgcgtgatgcggaacttctcggcccacgccgtcagcggcttccacagcagcacgtcgatgagcagcaccacgatgaccatggtcacgatggcccacagcaccttgcccagctgttcgtgctcggacgccaccgccacgaagctgccgaggccgggcagtgcgtacgtcctgttgttcacggagatcatctccgaggccgtcaggaagaaccagccgccgccgacgctcatcatgcagttccacagcagcggaatcatcgaattcggcacgtcgagcttccagaaacgctgccagcgcgtgagctgcatggagcgagccgcctcatccaactcctgcggttcgctgagcagcgaatggtagaaggagaaggtcatgttccacgcctggctggtgaagatcgcgaagatcgacgccgcctccacgccgagaatggagccggggaacaacaccatccaaatggtgaccgtggcggacaggaagccgaggatcggcaccgactgcaggatgtcgagcagcggtatcagcaccatgcgcagtcgccggcatcgggccgccgccaaaccatagatgaagctgaacaccagtgacaaaaacagcgcgatgaacatgcggaacaccgaacgcagcgcgtaatacggcagcagatgcaaatcgtcgctcaccgtgctcggcacacctgacgggccgatcggttcgttgatttgcggcagcagccaggcgacgacgccgaacagagcgagcacgcccgcggccaccaccacgtctgcggcgatgcggcgcacggcgccgctgcgggacatgtcggcggtgtcggcgccggaacgcggacgaatgccggggaacgaggagtaattgaagaagttggacataacggaacctgtgcgctctcatgtcgttatctcgaaggagataaacggttcccgttcggtgggcgttcgactcggtatccgtgcggcaagtgcgcgccatgggcgtcagcggtcgcgtgcaggcgcgccgatatgcgggtatgtctgcatgcagatagccgatcggcgtcgtcatatgatgatgccgatatgccgggagcccggagaacgggatgtggattcgcgattcaggcgttcggcgcgtacgtcatgcgggatgtcgcagccgtcgtgaggcggtgaagtcgatgcgagccgaatcagtcagtgatcggatcgccctcgccggatgcggcggtgtcgtgacggacggccaatgccatggtcgcggtacaaacgtgtgaagagaatgggccgtatgctgcgcccgatggcatgtgatgttgaccgccatcgcgcagccggctactatgacctaaatcgccgtccatgacattcacctcctcaatggaaccaatacgccgtcggacattgacgacatgaggaagtgcgacttctcgaagagttgcccctagtcgtgtcatcgttcaagcttcagcatcgcagggcggtggagttgcgttagttcatgccttaatccgacaagaactgctgacctgcgtgcagtgtctccactgttagcggcagcaacccatatccctgcggtagcctcgcctaccgacgctctcagggtaaaaccgccggcagaccatgtcaactccgtagtgtcgcgcccaaactacgccgggccatatcctgccccgccggcggggcaggatcggatggatgtcaggcgagcaggctttcggctgtggcttggtcggtggcgagggcggaaatatagctgccgaccaggcaggccttgatggccttgactttttcctgcccccatgccacgccgatgaccagcgcgatgcgcttcaggcgatcgagctccaccgaaatgatacggtcggacagctccgaacatacgggccttccctgcgcgtcgatgaagtgcccgcatacggtggcgaccgcgccctgcgcccggatttccttgaccatgtgtggtgtgacataggcgtcgaacaccggactgaggcggtcgccttcggtcgcaccgaccccttccagggccacgtcggcgccgccgccgagcgccagcgcggtggcgatttgtggctcctggcgcatggccgcggcgatatgggcggaggagaggatcatcggtacgtggagtgtggtgacggtgccgccgaggcgttcggcgagcatgcggcagatgtcgggcgaatccgtcatcggattgctgggggagagggcgcccaccatctgcgccacattggatttcggccagtcctggatggcgacttcgcggaccgtggcggcgacggcccgtccgttggagacggtgatgagcgagtcgggcgacgacttttcggtaagcagggccgcggcatatcgggggacgatggtgctgggatcctgcccgggattgacctgcgccactcgtgcgcatttcaacccgtaccgtcttaccagcgcgtcctccagctgcatcagacgttcgagtggatgcccgatctcgatgcgtaccatgccccggtcgcgcgattcgctgagcagccgcgagatggtgggacgggagtatccaatctgcgcggcaatctgcgcctgcgtcagattgtccgtgtaatacatgcgagcgattttcagcacgagctcgatgtggtttcgcgactcagttgtcgtcattgtcagcttgtttgcaaccatggcattattctattccatccggtgtgaccggtgaacatatgttagtttttccagtgcagcaacgatgctgaacaattgttcagagcgcgaaagaactcaatgaatccttggtatgtgagcgctcccaattgattgcaaaaaagaaggtcgattacatgtgctcactcagttctcatgtgttcgatgaacatgtgttcatcgcgcgggtggtgtgcaagacctttccgccgttagctagaggctgtcgacgcgcagggctcatcgaagaccgacgccgacggaaagtgcggggcaacaacgcagagcagcgggcgaagcagcctgcctcgtgcacgggaaaggaacattatggaaatcatcaacaccatcatcggcctgggcgcctcggtgatgatgccgatcatcttcttcgtggtcggactcatcttccgcatgggaatcggcaaatcctttaaggccggcatgaccgtcggcgtcggcttcgtcggcgtcaatatggtcatcaacctgctgcttgacaacctcggccccgcctcgaaggcgatggtcaaccgcctcggcctgcacctgactacggttgacgtgggctggcccaccgcctcgacggtcggctggggcacgccgatcatggtcgccacggtcgtcggcttcctcgtcatcaacgccatcatggtgttctgcaagctcaccaagaccatcgacgtcgacatcttcaactactggatcttcctgcaagtcggagcgctggtctatgccgtcaccggcaacttctggttcgccgtcatcttcacttgggtcatcttcgccatcgtgctgaaggtcgctgacctcaccgcgccttacatccagaaggaatacaacctcgaaggcatctcgttcccgcaccttgccggtctggcctggtcgccgctcgccatcgccgtcaactggatcatcgacaagatccccggccttaagaacgtcgacttcaacgccgacaagatccgcaagcgcttcggcgccatcggtgagcccgtggtcatcggtttcctcctcggtctgctcatcggcgtgctcgccggctacagccctgacaagtccgtgacgctcgccatcaacatcgccgcggccatggtgctgctgcccaagatgatcgacgtgctgatcgaaggcctgatttccgtgcgtgacgccgccgagaagcagctcaagatctggttccccaaccgcgagttctacatcggcatggataccgcgctgctcatcggcgactcctcggtgctcgccaccggtctgctgctcatcccgatcaccattctgctcgccttcatcctgcccggcaacgagatgctcccgttcgccgacctcgcgtcgctcgtgttcatcctcgcgctggtcaccccgttcgtgcgccgcaacatgttcaagatgctgatcgtcggcacgctgagcgtcatcatcatcctctacgtcggcaccgatatcgcgccctgggtcactcaatcgttcacgcagagcaacatcgacctgcccaaggacttcaccgccgtcaccaacatgaccggcgcagtgagcacatggattggctgggtcgccgtcaagatcggcgaactgttcaacatgatcgcctgagcggctgcgatatcatcggcacatattcaataaggaatcatcatgacaaacgcaacgaagcatttcctcaccattgacaatggcggaaccaacaccaaggtcatcatcgtcgaccaggatggccggcaactgtccgtctcgtcgttcccgaccgacgccatcgagcggcgtcccggcttccgcgaagtcaaccccggccagatgtggcgtgacatcggcaaggcggtcaaggccgcgctggaatccgccggactggatggaagccagatcgacggcgtcgtaccggtcggccacggcaaggggctgtacgtgctcggcaaggacggcaagccgttcatggacggcatcctctcctccgacagccgcgccgcggacctggccaacgaattcgagagccgcgtcgccgaaatctacccgatcagtcaccagcacgtcatggtcatgcagttcccggtactgctgcgctggctgaaggacaacgagccggaacagtacgcgcggatcgggcatgtgctgtccaacaaggacttcatccggcacttcctgaccggcgagatcctcgaggagcgtggcgacgcctccggcaacaatctggtcaacctcgaaaccggtgaatatgacggccggctgttcgacttcttcggcatcccggaaatgctggaatgcatgccgaagctcgtcagcgcgaccgaccgctgcggatccatcgccgccgaagcggcggcgaacaccggcctcgccgaaggcactcccgtgtatgccggactgttcgacatcgacgcctgcgcgctcgccaccggcgtgctgagcgacgatatcttcagcatcaccgctggaacgtggaacatcaacgtgttccccagcaagaccatggcgccgctcgacggcggctgcatgaactccgtgttccccaccggtggcaccttggtcgaggcgtccagcccgacctccgccggcaacctcgactacgtgttgcgcatgatgacggcagacggctccaaagccgccagctacgacgaactcggagcgatgctggaacgtaccgacgccaagtacaccgacgtgctgttcttcccgttcctctacggcagcaacgtgaacctgggtgcggaaggcgcgttcatcggactgcgcagctccagcgagcgcgaccagctgttgcgggccgtgtacgagggcgtggtattcgcccaccgccaccatgtcgagcagctgctgcgcgtgctcgggcacaagccgaaggccatccgcatctccggtggcgtatgcaattctgatccttgggtgcagatgttcgccgacgtgctcaacctgccggtcgagaccgtggccgtaaccgaactgggcggtcttggcggtgccatgtgcgcggcggtcggatcaggcctgtacgggtcgttccaggaggcgttcgacaacatgtcgaagctcgccaagcggttcgagccgcacgcggaccagaccgcggtgtatgaccgcaagttcgaggcgtatgaggcgctgctgaccgcactcgacggcggatgggccgcgctgcgtgacatgcagaactcgctggagcgctgacatggtcaccaacgcgctgggaatatatgaaaaggcactgccgcgcggcctgagctgggagcagacgttcgatctggtgcatgagctgggatacaacttccttgaattctcggtcgacgaaagcgacgagcgactggcccgtcttgactggaccgagcatgaccgggcacggttccgcgacgccatgtggcacacccacagccgcatcaacaccatgatgctctccggtcacaggcggtttccgctcgggtcaaaagaccccgaggtgcgcgagaaggcgctcgacatgatgcgcaaggcgatcgacctcgccgtcgatctgggcatccgcaacatccaactcgccggatacgacgtgtattacgagccgaaaaccctgctgtctcgcgaatacttcgtcgagaacctgcgcaaatgcgtcgacatggccgcgaagaaactggtgatgctctccatcgagacgatggacgacccgttcatcaactcgctggacaaggtcacctattacaagtcgcaagtgcgcagtccatggctgcaggcgtacccggatgtgggcaacctcacggcttggcccaccaacgatgtggggcgcgagatcgaatccaacatcgacaacattgtcgccgtgcacctcaaggacaccaagccggtgggcgagacctcgaaaggcgtgttcaaacgggtgcccttcggtgaggggacggtcgacttcgaggcgtgcctgcgtatcttcaaacgactgggataccagggcagctacacggtcgagatgtggaccgatgagtcgccggatccggtggccgaggtgactcgggccaaaaagatgttcgacgggctgttcgacgtggtgggcatcgaacaggagccgatcgccggcatcggagaatactgagcccgctcgtgggtgccggcgcgccggcaccgcctttgatgaacgtcccgatatataagtgcgaataagaaaagtgagtggtgattatggtttcgttggctgattttggtcctgaggttcgtgctgaggtcaagcaggtgcgtgaggtcgtggcggccttgcatcagcagctgatcaagtggaacctggtggtgtggacggcgggtaatgtgtcgcagcgtctgcattcggcggatctgatggtgatcaagccgtcgggtctgcgctacgagtacctgacgccgtcgagcatggtggtgtgcgatctggacggaaacgtggtggatggggcggaggcgccttcgtcggatacggcgtcgcacgcgtacatctaccgcaacatgccggacgtgtacggcgtggtgcacacgcattcgacgtacgcgacggcgtgggcggcgacgggtcagaacatcccgtgcggcctgacgatgatgggtgacgagttcggcggcccggtgccggtgggcccgttccgtctgatcggctcggaggcgatcggcaagggcgtggtggagaccctgaagaagtatccgaagtcgcaggcggtgctgatgcagaaccacggtccgttcacgatcggcaaggatgcggaggccgcggtgaaggccgcggcgatgacggaggaggtggctcatacgatgtgggccgcccgtcagctgggtgacatcatcgagattccgcaggcggacatcgacaagctgaacgaccgttaccagaacgtgtacggccagcactgacgacggcacatggagattgtgatttggtctcgactgcgagcgaggtatgggggtctgtgcttgtgacacgcccggaatgcgtagcacaatcgtcgcggttcaatatcgcgattggctttatcgcaccattcgcatggcgatactcaacaattgtgctgcacactccgggcgtgtcggctcgttccgtcggctgaacgggaggcttccgttacggagcccggccgaagttgaggtcaattccgtctcgtccatatgaatcaataaaatgctgttttgctgtgtcgagggtcggccgccgcataagccgcctcttcatgagtccagaccgaacgggcgcaaagccgctgtttcggcggattgacaggcttcctgagggcagacccgagggagttacagacgtgttcgtgatgccagtcatcaccgaaccccaaaccagtgcgctgatatgcggcagcgactaaggaatagcaatggttaacgctgttgaggcatttgacgccaagcacatgaagcccgccgaggagatcccggcgttccgtcccggcgacaccgtcgacgtcaacgtcaagatcaaggaaggcaacaactcccgtatccagaccttcaccggtgtggtgatcgctcgtcagggctccggcctgcgcgagaccttcctggtccgcaagatcagcttcggcaccggcgtggagcgtcgcttcccgctgcactccccgtccatcgactccatcaagctggtgcgcaagggccgcgtgcgtcgcgcgaagctgtactacctgcgcaagctgcgcggcaaggcggctcgcattgtcgagcgtcgcgacaactccgccaaggcgactcaggcctgagttttgccaagtgaggcgacagtaccgtgaaattcagcccggagccgattggttccgggctgaatttataggaacgccgctagtatagttggggtttcatgtatgcgtgatggaggaactatgcggccagacgaccatcggacggatcgggccatgcccggttccggcaccgaattcagccgggacgaatggatcgtcgccatagccgatcatggcgtggaccccaccgatatgccggggcgggtagtgggcaccgacggccgagactcgttggcccgccgcaggaaaggcgcccatcgcaagacctcgcctaagcacaacaatgattcgttctcgttccgagacctgctgatctggtgcgtcgtccccttcgtggcggtactgctggtacgcatcttcctgatcggcttttacgtgattccgtccggatcgatgcgcgataccatcgagatcggcgaccgggtcatcacgtcgaagctcacgccgagatatttcgatctcaaacgcggcgatatcgtcgtgttccacgaccccgcgaactggctgaaccaggagaccaccagaggcaaaggcgattatctcatcaaacgtctgatcggcttgccgggcgacgtggtcgagtgcggcggtgccgggcagccggtaaagatcaacggcgtcgcgattgacgagacgtcatacatcaaatccggcgtcgacccgagcagtttctcgttccgcgtcgaggtgaccgccgggcatattttcgtcatgggggataaccgcgccagctcagccgactcccgataccatcaggacgacggtgatcatggcttggtgcccatcgacaatgtggtcggagtgggactgatgcggtattggccgctgaaccggatgagtttcctgagctcccatcatgatgtgttcaaggacgtgcccgccggcaaggcgcagtgacatcagacggatggtgatatggcgatgattgaacatccgacgcttgatatggagcggcagcttgccgcccaaggctgcgatgtggtgatcggctgcgatgaggtcgggcgcggggcgctggccggtccggtcatggtcggggcggccgccatgtggtcacgtgacctcgccgccgcgcaagtgccggccggtgtcgccgattccaaattgctgaccgagcacaggcgcgaaggaatcgtcgacgagttgcgttcgtggtgcgccgcttacgcggtaggtcaggcgagtaacgccgaaatcgacgagtggggcatatcgcatgcgttgggcatcgccgccttgcgggcgctcaacgatgtggagcggcagctcggcatggacgggcctgccggttcgggtcgtcgcgtggacgtcatcctggacggtccgaacgattacatcaccaagacgatgaacacgtttgacgcgccggcgttgccgattccggtacaggtgtcgtgcaaggtcaagggcgaccgtcattgtgcgaccgtctcctgcgcggcggtcatcgcgaaggtgacgagggaccacctgatggttgacatcgcgcagggcaatccgcggtacgcgccgtacggctgggcgcacaacaagggatacggctcggcggctcaccgcgacgccatcgcccgtctgggagtcacgccgctgcatcgggtcacgtggcatctgacctgattgcggcgttgcggctgattccgggcctgcgtcgcgcagctcggcatggcgcggcttaatttggcccggcccggttatctgactcggtgctttgtctcaggtgcgggcgctgtagtgccacagttctttgtgagaagaagtccggggcgtgaatccgaacggcgcagtggtgaatctgttacctgcgcatgatctgtgagcgctcacgcgtgttatctaagcgttaccgggtagacttgcccatattgtgttgttatgcagcgggaggtttgacagcgtgacggccaagcgaagcgggcggaaacgcccatccatgttcgaagtcgcgaagctcgccggagtcagtcatcagacggtgtcccgggtcatcaacgattctcccgatgtctccgacgccacccgcaccaaagtgcaggatgccatcaaggcgctcgattatcgtcccagcaactcggcgcgagcgctcgcatcgcaccgttcccgcacgatcggcctgatcgcaggcggcatgaagttctacggccctatttcggcgatttccgcgatcgagatgatggcgcgcaagcacggcctgttcatgtcggtgatgatggtgcatgaggcgctgtgcacgcgggcggagttcgagaatctgtgcggcacgttcaacgagcagaacgtcgacgcgttcatcatgctcacgcccaccgatgtcatgttcgaagcggcctgctacacgcagctgacgcagcctcgcgtgatgatcacctccacgcacggcgaactcagcgtgagcgaagggctgcgcctgattcactcgcgcgagcgcgaccgcgtgtcgatcgtcggtatcgaccagtggggtgcgatgggcgatgtggtgcgcatgctgaccgaatacggtcacaagcgggcgttgtacttcgccggtccgttgggatggcgcggtgcgatgacgcgactggatgcctgggtgaaactgacccgcgcccgctccatcagttccgtcacggtgcgttgcaagacctgggagtcgaccgaggcgtacgccaggatgaaccatattctcgattccatcggcaatcagggcggcaagttgccgacggtcgtggtcacggcgaacgacaatcaggcggtgggcgtcgcgcgtgccctgtatgagcacggtgttcgcattccacgtgacgtcagtctggtcgggttcgatgacatgccggcgatggacaacatgattccgcctctgaccacggttcggcctgattttgaggcgttgggcgtcgctgcgatgcggcaggtgctgcatctgctgggggaaggtgacgaagtggcgttgcccgcgtccgcacatggtgtcggtctgctccccgcagaggtcgtgaagcgttcgtcgctcggtcccgccgccaaccgctgaccgaggatcgcgcgtttttcttgggtctgttagaccaacgtgttggttttgatttgcaaagtagctacatggtacgtgcaatgaagctatgggtaggcatagcaaggcagtgaaactggtcggcggagtccggggcggactcgcgctgctggatgatgacgagcgtcgtcgggcgattgaggcgggcgaacgagatattgacgacggcgtcggcttttttcgcggcacggctcggcctggcacggcgttgatagtcgcgtacgtcgacgagttcagggaccgtttcaggggggggccgggatcggccgcggcctggtgacgagcgtcatgcgggaaccgggaatccgcggcgcgcgccgcggcgggactcccgtcaccgccagaccggcgaggggcgcgggcggcgggcccggcctcgtggaacgcgggttcgaggcgggggcgccgaaccggccacaccggtcctcgggctgcaggacaccggaacggaccgaaaccgggtattacgcgaaccaagcggcgcaagccgccccactataagagcggaacaaaaaacaggccatatcaatgtgccagacggcacgttcgcaccaccccctcgttcggttatgcggcccggtagtcagcgcttgccggcgtacagctcctggtcgatcgcgccggagaacacgcggttcacagccggacgcacgaccttcagcgacggcgtcaggcaggagttcttctgggtgaactgcgcatccagcaccacgaacttgcgcaccgattcggcccgcgagaccgtcgcgttcgcgcggtcgacgaacggctggatctcctcgcgcacctgcgggagcgcggccacgtcggccagcgacaagtcggccggctgaccgatggtcggcagccacgacgccagaccttccgggtcaagcgtcaccaaggcgccgatgaacggacgcccgtcacccacgaccacggcgtgctcgacgatcgggcacttggcgatctcctcctccatcgggatgggggagacgttcttgccgccggcggtgatgatgatgtccttcttgcggccggttatcataagccggccgtcctcgtcgagcgagccgaggtcgccggtcttgagccagccgtcggcggtgaacgtttcggcggtcttctcggggagattgtgatagccgcggaacacgttcgcgccgcgcacctgcacctcgccgtcgtccgcgatgcgcaccgacgagccgggggcgggctggccgaccgtgccgatcttgttgtcgttcacgcgtgtcaccgtaaacggtgccgcggtctccgtcataccgtatccctggatcatcggcaggccgatgccggcgaagaagtgcgccagatcggcgctcagcggagccccgccgcacgccacataccggatgttcgggccgagtgcgccgcgaactgcgcggtacaccgatgtctcgaacatcgcgtgccgggcgcgctggctggcggaatgcttgcctccgtcctgctcggtgcgcgaccattcgcgggcgcactgggcggcctgcgcgaatatgcgccccttgaaaccggtgccggccttgcgtgacgcggcgttgtacaccttctcgaacacgcgcggcacgccgagcagataggtcggcttgaacgagcgcaggtcgggaagcagcgacttcatatccggcagatagccgaccacgccatcgtcggagccaatcgagcagtactggatgaaccgtgcgaagcagtgggcgaggggcaggaacagcagcagccgtggatggttgtcgcacagcacctcgccgaggcactcgtatccggctcgaaccaccgacaggaaattgcggtgcgtaagctccacgcctttcggggcgccggtcgagccggacgtatacacgatagtggcgaggtcgtcggcatgggtgtcggcgatgcgcgcctccagctcctcgtcggagaccgacacgcccaatccctccaaagcgcccagcgcgttgccgtccatcatgaggatgcgctgcaggccggggcatcggtcgttgatcgaatcgagacggtcatagcgttcgcggttatcggtgacggcgagcttcacgccggagtcgttgatgatgcgctccgcctgtgccgcggaatcggtgtcgtagatcggcacgttcaccgcgccgatcgcggcgagcgcgaaatccagcacgccccactcgaagcgggtggcggagaacagcgtcaccgcgtctcccttgccgatgccgaacgcgatgaggcccttcgctgcggcgagcaccagacggtggaactcgccggtggtgatgctcgaccacgcgcccgggccggtcttgcgcgccgcgatggtggtcgcattgccggtgcgggcgatgcgttcggtgagcagcgagtacagtgtctcgtcgtcgttcacggcgacgtcgccgggggaggtgtattcgctgatgatggtcggaacggcagcggtgccgaccggccgcgccgccggtgccgtcatactgggtgccggttcatccgccggcttggcggcttgggccgcgttcgactgatcctgtgcctgatcctgtggcatcgtggatttcctttgcagatgtcctgatacgtattccatcgtcaagggtacgttgccgtaggttcctgcggtgttgtgcatgggcacgaaaagcggcgtcgggttttgtcgtcgcgcacaaccgcgcggcgcaggccggcggcggcgcggtggcggacgtcgggcggacggtgttcccgcgcggcggtgcagcatggccggctgataacggattataggttttccttatcgccggaaatgagccgctgcgcgtgttcgcggcgggaacgcctctagcatggtgccttgtgtgccgccggcgcatcccggggatgtgcgggcggtcgaggcaacgacaacaatggcaatatagacaatacagtaacggcaacaatgacggcgatgacgacagtcgtcgcgacggccatcgccgcagcatatggaaggagaaccctcaatggctgaaaaccgagcggaactgaacaagaacctggcgcagatgctcaagggcggcgtgatcatggacgtgacgactcccgagcaggctcgggtcgccgaggacgccggcgcgtgcgcgatcatggcgttggagcgcatccccgctgatatccgtgccgccggcggcgtctcgcgtatgagcgacccggccatgatcaagggcattcaggaggccgtctccattccggtcatggcgaaggtgcgcatcgggcacatcgctgaagcccgcatcctgcaggccatcgacatcgactacatcgacgagtccgaagtgctttcgccggccgatgacgtctatcacatcgacaagacacagttcgacgtgccgttcgtgtgcggtgcgaagaacctgggtgaggcgctgcgccgcatcgccgagggggccgcgatgattcgcaccaagggcgagcccggcaccggtgatgtgatccaggctgtgcgtcacatgcgcacgatgaacaagcagattcgcgagctcgtcggcctgcgtgacgacgaggtgttcgaggccgccaagcagctggccgtgccggtcgagctggcgcgttacgtgcacgacaacggccgactgccggtcgtgaacttcgccgccggtggcgtggccactccggccgacgcggcgctgatgatggagctcggtgccgaaggcgtgttcgtcggttccggcatcttcaagtccggcgacccggccaagcgcgccgccgccatcgtcaaggccaccgccaactggcaggacgccgatctgctggcacgactctccgagaacctcggcgaggccatggtcggcatcaacgaggacgaaatccagaccatcatggccgcccgcggcgagtgatcatagcccgctagcggcgggacgatcgagccgcccctcccgctggcgaaggcggtcaacttggcgggggcgattccgcatgaatccgcccccgctggcggcgagggctgccgcggggcgactggggtggtagaggcacatcctcagtcaccccacccctccccaccgcattcgacggctcccctcatcgggagccaaggagtaatcatggttgtagctgttgaatatatttcgaaggaagagtccgccgatgccgagacggcaaagcacggcgtgaccggcatcctggccgtacagggcgcgttcgcagagcacgctgcgatgctcgacaagctcggcgcccagtggaagctgctgcgtgccgccgaggatttcgacgattccatcgaccgcgtgattctgcccggcggcgagtcgaccacacagggcaagctgctgcgctccaccggtctgttcgagccgattgccgcgcacatcgccgccggcaagccggtgttcggcacgtgcgccggaatgattctgctcgcgaagcgactggaaaacgacgacaatgtgtacttcggcgccctcgacgccacggttcgccgcaatgcttacggtcggcagctcggttcgttcgtctccacggccgatttcggtgacatcaaggactttccgctcgtgttcatccgtgggccgttcgtctccgatgtcggggcggacgccacgatcgagaccgaggttgatgggcgtgtggtcggtctgcgacagggcaacattctcgccacggccttccaccccgaactcaccgacgacacccgcattcacgagttatttttgagcctgtaggctcccgctagcggatcgggctgcttgtcggcggggaacggcagtgagaccagcgggctggtcatgcatggcatgtccgtaactgcagggtcgagggctgttcgcgaaggtgactggggcggccgaggactttcggggtatcatccgcagctcggcgtctcgatttttggccgagacagcaggtcgccgcgtcccttcgtttcgtagttgtgccacaccagcgtgattttgcccgatttggccgtggtgtggccacgccgatggccacaccagctcgtgcaaacgtttacatgacctgttgtggtacatgatgtcattcgttttccttgaaatatcaaggaaaacgggattcgactccaaaccggtatcgggcgcgtgtgccacagaaggccgaaaagaggcaaaaaagccctggtgtggtacagactttgcgatgtcgtgtgcgtcgtatgacccacaaatcgccggatggtgccatctgtcgacacgataagcttatatcaacgttgtcatgccatatcgttcgtcgcttccgaatgggtctttagcggggtgaaagatgcggacggtggatcgggggtttgacttctacttcaaccgtgcgaagaacgaggctgtcgtgcgcgagccggcaggcgagaccctgctcgtctaccgcggatgcggcaataccgatgatggcagggccgtcacgctgaaacgcaacggtgtgctcatcacggtgtcgcaacgttgacggatcgccggctccagacatggggccggcgattcgaggagagtcgggccgcggcgaagtccgcgacgacgtcgacgtggacttcgtcgcaatgctgctgcgcggggagacgcgggttcatgacggtgaccgggcttccggcgcggaagcaacgccggccgcagggccacgggccgattaccggctacggctgacgctggaccaatggacgccggacggtgcggtcagcggcgaaatcactgacatcactcggctgcgactgcggttccgcagcgattacggaaccgtgacggccctcgacggatccgccgtaccgcagacccaggatctgttccgtccgctcccgcttgcggtgcgccgcgatgacgggtcgggcattgacggctcgactgccgatacctcgcgcgtggtcatctccgtcgtcgcggaacgactcgacacccccgtgcgcatccccgacacgcctgacgcgaccggcaggcggggcatgcgtttcttcgccgaccctgaactcgcatacgaacgcgggacgttctacctgttcgccaccgccgacggacacagcgagtggagcggctggcagatccactgcctcgcctccgaagacctgacgcattggcaggaccgcggcgtcgtcatcgacctgcatgaccagcatctcgacggcagcggccgaaccaacatcctgcccggccggaccgcccacgcctgggtgccggcgctcaccgttcgcgacggccgctattacctgtatttctgcggcgacgggcagaccaacgtggcggtatccgaccatatcgatggaggatacgctctgcagggcgacttggcgcgaaccggctcgcacgccgcgcggcacggcttcggaaccggcatcgtcgcgcccggcatcgatcccgcggcgttccgcgacccgcagaccggccgatggtacctagcctggggcagaaccgggcgcgctactcccgcctgtccgacgacatgctgcgcatcatccccgaagccacgcccgacatccgggaggccgcatatctgaacgtgagagagcatgccggaacgtggacgtactatctcacgtactcgatcggcgacaccaacgaccccgactatcgagtcgcctatgcggccgcgtcgaccatggaaggcgacggttcgcagtggacctatcgcggcgaaatcctggtcgccaacgaacgcctcggcatactcggcaccgggcatcactgcatacttcgggtccccggcaccgacgaatgggtcatcgcctaccactgctttctgccggacgccatgcgcccgcgcggcgtggaccggtacgcgggcgggcgcatccgcaccggcaacaagcgcgaaatccggttcgccagactcgaattcgacgaacggggcggatggcgtgccgctcatcagaccggtgacggtatcgatgagcagcctggcgtggtcatgaacagcggcgacatgcgtggtggcgaacacgtcatcggatggcaacgatgtcgcgaagacgacaaaaccgtagcagacatgcggtaaggaggcccgtatgacaacttcggcgaagacgattaccatagggggagtttcctctacgagtaaggttgacgcgatgggcaagaccgaaaacggcaagaccggcaagagcgagatcgcgcagaacctgccaggctcgccgacgacggccgcacgtcggcgcgtcacgttgcgcgacgtcgccaccgcggccggcgtgtcgctgaaaacggcatccaatgtcatcaacggcaccggacgcatgaccgacgccacccgcgccaaagtcgaagccgtcatcgagcagaccggataccgggtcaacgtcgccgcgcgcaacctcaaccgggaccgcaccggcttcatcacgctcgctgtgccgacgctgaccgcgccatacctgtccgagctcgcgaaccgcgtgatcgacgccgcccggcagcgcggatacctcgtgtacgtcaccacatacgcggaagggtcggcgacgggcgcccgtgagctgttgcgcaacttcaacaccacggtgtcggacggcatgattctgtcgatgagcgaggtcgaggacatcagcccggaggacctggaggtcgatttcccgctggtggtggtcggcgcgcgaaccacatggggcaaggccgatcatgtgacgcccaacgacgtgcaggcggcggcatcggccgccggatacatgttcgactgcggcgtgaagtcgctggcggtggtcggcggacgtggcgcatatgacgaggcgaagctgctcggcgcggtggaaggcaacgcgcagctgcgtttgcgcggcatcatcgaagaatgccggcgacgcggcgtgacgctggactcgcggctggtcggcaatgtcgagcaggaatggacgattggcgcgggcgcccatgccacgcaggagctcatcgacaagggcgtgccgttcgacggcgtcatcggcctgaacgaccagctggccatcggcgcgttgaccgtgatgcgcgcgaacggcatcgagattccccggcaggttcaggtgatcgggttcgacaacatcgaggagtcgcaatacctgcagattccgctcaccaccatggattcgcgtctggagtggaccgcgcctaccgccgtcgagcggattctcgggcgcatccgcggtgagatcgctaagcccgagttgttgatgaccgattgcgacgtgattgtgcgcgacagcacgcggtgaatctcggggattacgggaaccacgctctcaaaactcgcagatacaggccatttttagtgaatttggccctgtgagttttgagagcgcgttgtgtataacgccgcgtttccctatttgaggtcggtggcggcatgtgctccgtcccgcgaaagtcccgtttcactggccttggatgggacttttgccggctggggtggtcgagggatgcttcggccatgggtcttgcgtagaaccgtggtgtgcgtcgggtctgatttgtcgcgacacgcccggagtggtggcacaattgcgaggctggttattgcggatcggaggaattgcgcggtttgtcacgactgcatatggcggttgtgctgcgcactccgggcgtgtcgcagctgatggcggcggcgttccctggcgacgtcgttccttgataggtggcgttcctctgtcttgcgcgttgacatgttctggtatagcggtatatcattgctcttcttgatactccgttgtatcaaaagaagccggttccgcccgccgacacgatcgcgctggtgctctccggcgtggatgacgtgacggtggaacaggattccgaattcgagccgttggtcggcgtgtcggccacggacgatgtggatggtgacgtgaccgatgccgtcaaggtgtccggttcggtggacgcggcgaaaccgggagagtacgtgctgacgtagacaaggccggcaacacggccaccgctgagcgcacggtcaccgtgaaggccaaggaagggccgacggagccgaccgagccaagagccgacggagccgggtaagccgagccgagccgactgagcccagcgagtcggataacgacaagacggaagtgccgcacggccagcatggtggccggcagaaccagcatggcctgtccgccacgggcgcgtcgcggtcagcgggctggtcgtgctgctggccatcgctggcggcatggtactcatcggccggcggcgttgtctgccggcccctgcaccgatgccgccaatcgcgaatcgtatgccgatcatccgatatgatggcatactggtgtagggaggctcggcatatcgccatggcatatgctccgaaccggatgtagtgtgaagacaaggagacgaccatgctgggaaccagcgatctcgccgttgcggcggctgctgcgagcgtgccgggaatcaaactcaatgacggcaacgtgattccgcaaatcgggttggggctgctgcgaatcgagaacgatgatgtcgctcccgtggtcaaatcggcgttggcggcggggtaccggcatatcgacggagccgcgggctacaacaacgagggcggcgtcggccgcgccctcgccgaaaccggcttcaacaaggggcgcaagcgcagtcatctgtgggtcacgaccaagctgcgcgactccgagcaggggtacgacatggcacttgcagccttcgaccgacagctgggactgttgcagctggaatacgtcgacatgtacatgattcattggccgactccgttcaattggcgttccggagcgacctggaaggcgttcaccaagctgcgcgacgaaggccgtgtgaagacgctgggcgtgtgcaacttcctgccggagcatctgacccgtctgtacgaggagaccggcgaatggccggcggtcaaccagatcgagctgcacccgacctggcagcagcgcgaagtcgtcgcattctgcaaggagcacggcatcgcggtcgaagcatactccccgatggctcgcggcgccgacctgaaggccggcaacggcacgatcgcgcgaatcgccgaggcgcacgaggtgtcgcctgcccaggtgatcctgcgctggcacatcgaaaacggcacgatcatcatccccaagtcggtgcactccgaacgtcagcggcagaacctcgacctgttcggcttcgcgctcacgctcgatgaacatgccgccatcgacgcgctcgacggtccggaacgcgcggggcacgaccctcgcacgttctcctacgcctgatccggcggggagaaaggtacgcggcgtgagtccgggcttatgccgcgcgcctgagccgacgacgataccaccgcgcagcccacgagactgaccgcagaaccaacgacaggccgattgaccatgcgcacgcattttcgcaaacgccgattccgcggatcatccccgctggaacgtcttatgatactggtggtgatcgccgccctgctcggcgttgtcatcggtctggcgttgcccaaaatcagcccctccatcggcgagatcaccggcgaatacattgcctccggcccggcggcggacgcgctgaacgggctgcaggtcgacgaccggcccgactccaccggctacgaccgcgactccttcggattccgcgccaccgacgatgatggcgacggctgcgacgtgcgcgacgatgtgctcgcccgcgacctgactgatgtcatattcagcgcagccaagcgctgccaagtctcctcgggtacgctcgccgacccctacaccgggaagaccatcctgttcgtgcgcggccgaaacaccagcgccgccgtgcagatcgaccacgtcgtggcgctcgcaaacgcctggcaatccggtgccagggactggaccaccgcccagcgctaccgcttcggcaatgacccttacaatctgctcgccgtggatggccccgccaaccaggacaagggatccgcctccgccgcttactggcttcccaccaacggcgagtatcgttgcgaatacgtcgcgcggcagatcggcgtcaaacggcattacggtctgaccgtcaccaccagcgagaaacgttcgatgctcgccgtgctgcgcgcatgccccgcgcaacagatccccagtcagtgaggggcggaatagagcccatcgctcgacaaatgccgcagtccgcccagcgggggagtcgtgtggcgggaaattcgacggtctgttacaaacgcggtgtataccattaggcggatcgagtagcgcccaggggtcgggcgcatgagaggaatgagggaatgaaagagcatcgtcagatgatcgatgacaaaaccgattcagagatcgacatcgaacgcagccatgccgaggaagcgtccgggcgccagcatcacgagcatgcgctcgccagcatcttggggccggcgttcgtggccgcggtcgcctatgtcgatccgggcaatgtggcggcgaacatcacgtccggcgcacgatacggctacctgctggtatgggtgctggtgctggcgaacgcgatgagcgtgctgattcaataccagtcggcgaagctcggcatcgtcaccggcaagagcctgccggaactgctgggggagcgcatgagcaacgcgggacggttcatgtttttcatgcaggcggaggtcatcgccatcgccacggatctggccgaggtgatcggcggcgcgatcgcccttaatctgctgttcgggctgccgttgttcgtcggcggcctggtgatcggcgcggcctccacggtgatgctgtggttccagggcggcaggacgcagaccacgttcgaacggatcatcatcgtgttgctgctggtcatcaccttcgggttcatcgcgggcctgttcgtggccccgccggatcccgcagcggtggtgcggggcctgatcccacgcttccaaggcaccgattcggtgctgatggccgcctcgattctgggcgccaccgtgatgccgcatgccatctacctgcattccacgttggtcaacgaccattactacacgcacagcgataagccgtcgatcgccatgcagctcaaaggttcgaagatcgatgtgacgtgggcgctgctgctggccggcacggtgaatctggcgatgctggtgcttgccgcgaactcgttgcacggcatgtccggcacggattccatagacggcgcgcaacgggcgatcacgcaggtgcttggcccggtgatcggcacgatattctccatcggcctgctggcctcgtcgttgagttccacgtcggtcggcacgtatgccggttccgagatcatgcgtggtcttctgcatgtcaacgtcccgatgtgggcgtgccgtgtggtcacgctggtgcccgcgctgatcgtgctgtggttcgccaaagaccccactcaggcgctggtcatcggccaggtggtgctgtccatcggcattccgttcgccgtgattccgctgatgcgttatacgcacaccaaggagcttatgggcgaatgggtcgacgggacggtcaaacacgtgatcttcatgatcgtggtggcgttgatcgtggcgctgaacgtgctgctgatcgtgcttacgattttcgggcgtgcgtgacgtggacgactgacgccgagactcgccgatttcccgcggattccgctccgagatgcgggattagggatggcatatgacgaaagcgttcctaagtgcgcgccgaaacgacgaccgtgcgcacttagcgacgcaaaccgggccatttgcgtccctaagtgcgcggacttgtcatttcggcgcgcacttagagacgctttcgcgctctgatggctctggatcgttcggagccgtgatgtctggcaattggattccggttaccggtgacgttcctacgcaaattggcgactattgtcatcgtccggtgacaatagtcgccaatttgctgcgattaccggtgcgagaccgtgcggattctcgcgatggcccgctgcgccacgtcccgcgaggatccggcaccggctcctttgacgccgaacagcacgatgagcacctgtatgaacacgatgaacgcgctgactcgcagcgtccactgcgtgccgaagatgctcgcggcgattgcgtcgcctccatgcagttgaatcagcgtctccatcaggatgaccagcacgggggctccgatcgcacccgcgatctgccggaccgtgttggtgaccgccgacccggctgacacctccgtcgggtcgaggcagttgagcgaccaagtggtgatgggcatgatgatgaaacccatgccgatctggcgcacgaactgccatatcgatacccaccagatccacgtgttgctgtcgatcagactcatcatgatggtgccgaacagcagaaccagcgtgccactgagcgccaccggcctcgccccgagccggtcgagcagcttgccgccgaagaactgcgagatgcacatgccgaatgcgccgggcatcatgaccagtccgctgatagtcgccgaatagccgcggtcgttctggatatacagcggcatgatcaccatgatcgaactgaatgcgaagaagctgagcgcggcgcagatcgtcccgacggtgaaactgcggttgcgcagcacgccaaggtcgagcagcggcggttcgggagtggtgcgttgcgcggtgtccgactcgtccacggattgccggacggccaccgtatacgccttcgcgcggcgcacctgccgcaccacgaaccacacgatgccgcacagtccgacaagcatcgcgccccacaccatcggattcgacggcgcgtacgattcgatgtttgtgaacccgaacatcaggccgccgaagccgagcaccgacatggccacagagaagaaatcggccttggcatggtcgtcggtcgtcccgaagttacgcagcccgaagatggccagcagcaggcagaacacaccgatcatcgtgagcgtgaagaaaatcgaacgccagccgaaactgtcggtctggaagccgccgaaagtcggccccagcgcgggggccacgctcatggccatgccgaccgcgcccatggccatgccacggcgggataacgggtagatcgagaagacggtgatctgcagcaccggccacatcacgcccgtgccgacggcctcaagcagtcggccggccagcaccaccagaaacgtcgggccgacccatgccagcagcgatcccacagcgaacacggtcatcgagacgatgacgatttgccgggtggtgaagcggcgcgtcaggaacgcggtgagcggcaccatcacgcccatgaccagctggaaaatcgacgtgagccattgcccggtggtcacggagatgccgaattccgatacgatggtcggcagcgcggcggacagctgcagctgcgtgaagttgccgacgaacgtgatgaacgtcaagatggcaagcgaagcgagggccacgcgcgaaagatggccgttcacgtagctttcgttgctggagagcggcgtggacagcgtggatacgcgtttaccgccggctgtgccgccgcgctttgcgagggttttcttcgggttcttgccgttcgtgctggtttccgtgctgctgtcgttattgtcgctgcgattggtcattgtgccgtattctcctccgttccgcctcatgcgcctgtgtatgcgtcatccctgtttcgctgcgtagggattgttgtatatgcatcatttctgccgaccaatatacactactcctacagatgggcaacccgggtggaggcgtggggagaaggttgggggagaagggcgcggaggaaaaatgtagggaaggccacggaggggtgggatggaagaacacagagaggagggcgcagggaagcggaagtagagtagggggagacggaaatatgagcactcagatattggcggcgcggagatgcgacggtgcggaagtcgcgccgccgcatctccgtcagtacgagccggtgccgcgcacgacggccaccacggtcttgagcaggatcgcgatgtcgccggtcagcgaccagttctggatgtacgacacgtcgacgaattcggactgctcctgcgtcaggttgctgcgtccggacacctgccacggaccggtgatgccgggcttcaccagcaatctggccgaatacagcgtgccgtagcgcgccacttcctccggcagcggcggacgcgggccgacgaggctcatgtcgcctttgagcacattgaagaactgcggaatctcatctatcgaggtcttgcggatgaaatggccgattcgcgtgactcgcgggtcgttcttgagcttgaagacgaaccggtcctccataccgtattcctcggcgagctgcttcttgatggcttcggcgttgacgttcatggaacggaacttgtacatcgtaaacggcttgccgtagatgcctatgcgctgctgccggaagaagacggggccgccatcttcgtgcttgatcagcagcgcgacgaccagcatgatcggcgaactgatgatgatcgcgatgagagagaagaagatgtcgctcaggcgcttgaatattctcgtgatggtggagtactgcgtgagctgcgcggtgagcaccggcatcaggggattgctgcggaagtggagctgcgcggcgctcaggtcggccagcgacgcgggctgcgcgagctcgatgcccatggattccatggcgagcgatagggcacgcatggtttccgaatcgcgggtgagtacgtcggcgatgagcacggtttgcgctttcaggtatttcgcggtgatcggcagatgggagtccagcggcagcgcgatcagttcggcctcgtcgctgtcgtctgcggtgaaggggaccgagaggagtcgtcttggtgcgtttggcgtgttgcctgcgctcgccttgacggggcagaccgcgatggggatgtatccgagcgacttgctgttgcgcagctgcacgatggtgtcgtgaatgctctcaggcgagccgatgatgatcgtcggatatccgaagcccttgccttcacgccggtggcggtgcaggaaccggcgtgcgagccaccgttcgatgatggtgagcatcatcgttggtgtcatgacaatcgtgcaacagctgattacacgcagaggtgaatgatgaatacaagacgtgtcaccgtgggagtggtcgttcagtacatagtgttgacgctcgtgttcattctgctggcgggcccgctggtatgggaattgtcgctggcgatcaaggggccgaacgacaacgtgtactccctgccgccatacctgtttccgaaggatttcacgctgaacaatttcgtcgaggtgttcaggcgtctgccattgctccggtatttcggcaatacgctgattgtcgtggcaggtaatgttctgggcaacgtcgtcggatgtacgctggccgggtacgccttcgggtgcctgagattcagatggcgcaacatcggctacatgctgtttgtcctggccatcatcatgccgacggagggcattctgatctcgacgttcctgctggtcaagtccatgggattgacgaatagtctgctgggcttgattctgcctggcctgatcggccccctgaacgtgctcctgatgacgaacgcattccgttccgtgccgcaggagttgatcgaggcggccaaggttgatggcgccaacatgtggcagaggttcttccacatagctgctccgcaggtaaagggcacgatgaccgtgatcggcatcctctcgttcgtggggagctacaatgacttcctctggccgctggtcgtgctcagcgacgacaggaagtacacgctcacactcggtctgaaccggcttcagggaacgttctacacggatccgcgactggtggctgctggtgcgatcatctcgctcgtgcccatagtcatattcttcgcgctgttccagaagaatctgttcctcggattgcaggaaggcggtctcaagggatgattttgtttgcgtcacgtttgatgttgatgcgggggtagtgacatgcgcatactgtacatgccattggacgagaggccctgcaacaggaagtttcccatgatgctggcctccggctgcggcgtcgaactgatcacgccgccacagtcgctgttgccggacaagaaaaggccgggtgattgcgctgcgttgcatgatttcctgttggaccaggccaagctgtgcaacgcggccgtcatagcgatcgacctgctggtgtacggaggcttgataccgtcacggttgcaccacttgggtgccgatgaggttctggaacgtctggatgtgattcgtgagctacgtctgcgtaatccgaccctccgcatctatgtcgcctccactatcatgcgtgcaccctcgtatgattccagcgaggaggagcctgattactatgcgcggtacggacgaatgctgtttcgccgggcatggttgacggatcggaagcagcgtgagggactcgacgagtcggagcaggatgagcttgcgaacattgctgttccgcaatccgtgattgacgactacgagcatcgtcggagcgtgaatctagccgttaaccaggcttgtcttcgtctggttgaacagggggcggtcgattatctgatccttccccaggacgattcgagcccgtacggatacaccgcgcgtgcccagcgttcgttgcagcggagcatatgcgcgcagcatctgatgcgcaaggtcgcaatgtatccgggttcggatgaggtcgggcagacactcgtgtcgcgtgccatctgcgatgtcatggaacggcatcctgtgattcgagcacgatactcgggggaatacggtgccggaatcgtaccctcgtacgaggatcgtcccctgcgagagaccgtgctgagacacattcgggctgccggtgctagggtgtgggacggctgttctggagcagacatcgaattgctggtcaatgtgccgggcagacgcatgcaggaagcgtctcaggcaatcgacggtcgtgacgtcacgtatgactcctacaggaatctgccggcgttcatcgacaccatcgaacgcctgctggtgcaggaacgtaccgtggccttggccgacagcgccttcgcgaacggcggagatcccctgctggtcgatgagcttgaccgtgacggcatgattcctgcgctgacgtcatacgccggatggaacaccaacggcaatacgcttggtacctccatatcccaggcggtggccgtcgtccgtggcaccgacactgatcgaagaatgctcaacgtgaacgtagcgtaccggatcatagaagacgtgttctatcagagcatcgtccgctggcaggttgacgcccaggtatccgatcacggaggatcctaccaggacatcggcgtctgccggcgatgggccgaggatcatacgcgcaaccttctgcaacacatggtcgatgagacgatgctgtcgaaggcgttgcctcttcaggttgcacgagtgagttttccatggcgacgtttgttcgagatcgatatgaatcttgaaatcacctgatgggaggctgcatcatgaatcacccgacttatgttcgtgaaaggggagtctgacaatgaacgacggaaccgatgaagagggcaaactgatactggcgttggacgtcggtggcacaaagattgcgggtagtgtcctgcgattctcatcggggcacatgcctgagctgatccgtctggtacaggagcccactcaggcgcaggagggcggattggccgtgctgcagcggatcgtcgagttctcctgcgagttgctgggacgaatcgaccgggaagtgatgggcataggtatcggtgccgccggtgtgattgcgctggatggttccattgaatccgcgacctcgctgatgccgggatggtcgggaatgcccttggggccggcattgcgagccgccaccgggaaaaccgtttccgttgtcggagatgtgcatgcgcacgcgctgggagaagcgcattggggtgcgggccgcgatgtctcctccatgctgctggtcgcggttggcacgggcatcggtggcgcgatggtgcttggcggtcatgttctgcatggtgcccacaacgttggcggtcacataggacatgtgtgccatccggatgctcgccgcatcaggtgttcgtgcggccggtacgggcatgtggaaccgattgcctccggactgggcatcgaacgttgctaccacaagctcagcggtaaggacgcaaggggcgatcgcatcgccgaaatggcaaggaacggtgacaatgacgcgcaatccgcagttctcatggcgggacgtgcacttgggaataccctggggatgcaggccaacatgcttgatcctgagatgatcgtgctctccggatcggtgtgcggtgccggtgagctgtggctggacgctgtgagacagggctatcaggatcaggtgatcgatgccttgtcggacattcccatagtgcccggaacactgggcgctcaggctccgattctgggcgcggccgttccgctggcccagtacctcggactgatcgagggcgatgaaggcacggctgtggagaaggatccgatatgcgtgatttcgtgagtcaactgcagggcggactgatcgtcagctgccaggcctatccgggagagccgatgagacacccggaaaccatggcgcagattgcactgtccgctcaactcggtggtgcggcgggcatcagatgccagggcttggccgatatcagtgcggtcaaggggcaggtgtcggtaccggtcatcggcctatggaaggaaggcgagagcggagtgtacattacgcccaccttgcgccatgcacgctgctgcatgatggcaggtgccgatattgtcgcccttgacgccacgtcgcgtcctcgaccggacggcaggactctccggcagacggtggatgttctgaaggaggaaggcgccgtgctcatggctgactgcagctgtctggacgacgccttgcaggcagccgatcttggctttgacttcatctccacgacattggccggttacaccggcggccggccgatgtccgacgagccggactggggcctgctggagtccatggtggacagactcccaaacgtgccagtcatttgcgagggacgcattcatacaccccggcaagcgcggcgtgcacgtgacatcggagcctgggcggtggtggtgggtaccgccatcactcatccgaggcgtgtgaccagctggtttaacgccgcgctgcacgaataaagatatttagttattcttcgatgatgcacctgcggtgcagattaaggcatctaggagtggaaaagggtttccatgggtcgttatctgctgccttttgactgctggaggatgttctgtgccttctcgttggcttctatgtaggttgcgtcttcaagcagctccctcagtctagggctgctcaggagctgttcgactttcaaggccagccaagggccgcgggccatgtccatgccgacggcggcgcgggataccagctcatactccgcatcggacagcttcgccaggacggaacggtactgtttgtcatccttccagtcggtgtggcctgtgcggaagcggggtgctcggaaaggtttcttgttctttgctgccagctccccgggttccaccatggtcgcggctagtctgatgatcaatgcttccgtgacatggttgtctttgctggcttggtcgagcatgtttccgacatgcaaagacatcctcatgagcacgcttcgcttgtgataattcgtgttttcgtagctcatggcttgttcctttctatctgcgtgccagcggaaagcgttttccaccgtattgtgccggcgacttggaaaatgctttccaatggattgtcaatttggcctgaaaagtttccaagactggttgggctcgtgcgctatgggtttggctgcgactggtgtatctgctgagcagccaggcgatggccgcggtggcgatggcttgccaccagtgtgtggtggcggcaacgccgtctgtcatgagagtaagaaccgacacgaacaggcaagtcgtgcctgtgatgatcatggcgaatcccacgccgattgcgagctgacttctcgccttgggaatgctggcgaggccggtgtaggtgagcatgattccgtcaagcagtacgcacacgtccatgatggttcttccggtcttggtcgtcatcgaaatcgaatcgtgcgcccttctctttgtcaaggacgagcatggcgtcgaacttacgtcccgtcttgctggtgaatcccctgaggtggacggagccgccgtccaggagtatgcgcacggtgctgtcggtgaggtgcttgcctgcgatggtgccgaagagcttccacccgcatcctccggtgagcttccagtggccttgcatgtccttctcgttgacgttgctggagcattgccacacggtcccggttttccgcacaggttgaccacatcgggggcatggaccccagtcttgcttatgagggactgaggcgaggtcggttttgttgtccttggcttctgcggggatacctgccgcgtaatggcggaactcgttatccactcgcgcaggatcggtctgctcgtgttcgacctggctgagctggcgttccagattggcggtgagcgccacgtccttgagcttgggtgagaccacatcgatgagtccgcggccttccggcgttgagacgatggatttcccctggcgcgtgatgtacccggagctggcaagtcgttcgatgatctcggcctgcgtggctggcgttccgatgccgctggcgtgcgtgctgtcgtcctccaatgcggctttcaactcgtccgcgttcttcgtcttcatgtcgagccaacggctggcgtgttccatcgcattgagcagggtcgcgtcggtgaatcgtgccggaggcttggtctctcccttgtgaagctccgccggacagaccggggtgagcgtcacgtcttcgacaaggttgggcgggatcgtgtcatgtcggctgacattgtccggttcgtcgtcgcttgtgtcctctgcttgctggcatgatggttcgatggctttccacccgtcttgcagggcttgctcctggcgtgtggtgaaacctgtctctagatcctcgtcggtgattccggtggctgtggtgccgcattcagggctgatgcgggcttgcacagtggtgatttccacgatttggtcgtcgctgacggcttcccacatgcgacgtacgattcgtgtgagaacgagccgttcctgttcgttcaagtctgccaggcatgtctggttgacccggagagtgggcaggatcgcggtgtggccggcgactttcttgtcgttgacggtcaggcccaggcgaggctggtcggggcgcgtgtctggggtgatgaatccggtgacacggtcgtctctctgggtgagtcggacgagggtttccaaatcgtcgtgcgtgatgtactggctgtcggtgcgcgggtaggtggccagcttccgctcgtacaggctctgcaatgcggaaagggctttgatcgccggtgagccccatgcatgcgggacatgtctttctgcaagccggtcagatcatacaggcgtggtggtttcctatcctgtcgcttacgctcgactttggtgatggtcacgcgcatgccaggcatgtccatgatgtcgagcagatgccgtgcccggggctcctggtcgatgcgctggctggtcaaatgccagccgcccatgtcgaggatgattttccagaacggagtgggccggtggctctcaatctgccggtcacgtcggacgatcatgccaagggtcggcgtctggacccggccgacagtcaagcgccggccgtagacgagcgtgtaagcgcggctggcgttcatgccgatgagccagtcggccttggaacgaagttcggcggctgtgccgagtccgtcgtatgcggattccggtttcatctcgctcagggcctgtcggatggcgggttcttccaggctggcgacccacagacgcatggccggcttgtccacgccggcatggtgacggaggtattggataacgcgacggaagatcgactcgccttcccgatccgggtcacatgcgttgatgagcgtggtcacgtcatctcgttggatgagctgttggacggtcttgaattgcctgtcggcgcctttctgccggttgacgacaagtttccagtcaggtgacgggtcaaggggcagcgtatccatccgccagcgcccccaatcgtggtcctggtactggtccggggtagcgaggttgacgaggtggccttgcgcccaggtgacgagcgtgtccgctcattgcagatacccgtccttcctgatggcagacgtgtcgagtgcctgggcgatggcttgagcgacggaatgcttttccgcgatgatgagtcgggtcatgaccgatgggtcctttgtcgaaggatcgtgtctgatagaacgaggcaagggccggaatcatacggcaggtcatatggttccgacccctggtcgtggattggctgatcaagcaaggccgatgagtggcgcgaacacggctgccagtccgagcagacaggcaagcagacacacgaccatgaggatgtaggcgatgacctggatgatttttttgccgaccgcggaaccgtccgtttccgtgaaggcggggtggctgagccgcatcgcgaccatgcgacagacgcctgccacgatcaatgcgaccagggtgaacacgatttgtagtgctcccggcaggttcagagcgaactgccagaccgatgacgctatgtcggcgatcatcccgagcagatgttccattgattgtcccatgagatgttgtccctttctctggatgagcggtccaatggtcgtctcccagcatccatcggttctcgcgtcatgccggagcggcccctctacacgtctcccaacggctgaaaggtgtagagggggccgctccgtcactgcgcgtcgaaggtaggagcatgacggatgacaaggcaaagagccatgaggaacggagatgctgatgcagccgaacaacgagatgcgtaatttcaaacgccaggtactgacgcgtgtgcgcgggttgcgtgaggaacgcgagaaagcggcggacgagtacgcatccacgctggtgaaccttcgaagcctgcgcgcccgtctgcaagtagcggagcatgaggcgcagacggtccgtgaacgtgcaaggaaggccggaaacacggttgccgaactgctcgccatcgaagaactgattgaaaacagttggaaggacagccgggagccggccgtatctgaatcatcggagggggctgcttcagacatgcgcaaagagatgcaggctgcgtcttctgcggatgacgagcccgtcatggcagctgccggcggcgactggccgtctgatggtatggaaggcggcatgtgatggtgtcgaggccggcgcccaagccgatgtcgaaatgggcgaagggcgcgtgcatgggggttgcgatactgctggtgctcgccttgggatcgcggtcactgattggacgaggggcggcgacgagaacgagtcctcgatccagacggatgcttccatgaccgaggaaggttcgtcatccgacgggaacgacgcggacgggtcgtggcgtggtctggagacggcggggatccccaagcccggagcgtggtcacggcaacgcatgtcccttgccacgatacgggacggcaagattgattatggaacgaaggatggcaagactgattattcggcggattatccggtggccggattgtatggagccattgacacggcgttggcaaccgtgaaccgtctgcttgatcccgaatcaagcgatgacgagtggaatgatgtgatccgcaatggtctggctgcggacgggggcggtgtggagcatccgttctctgacgcgtcgcgttggtggtgggcgcaacgacggttccaacctgacagcttgtgctctggccaggcggacagcaactatctggcggcgaaactggatgacgggtgttctcctgacggcgcatggacgaggaaggccacggacgcgatcacgaacaacgtctactggtacacggacgccaccgggttcccgatcccggacgggttgcagttggattcccgcgtgaacccgcaggaaatcgtgagccgtgcgtatgacgcggtgctgattccgatggatgacggtgattggcatgtgaccgtgtactgtccggccacgctgagccggcctgtggtggatcgggacggcaatgagatcgacatcaccaggatgaaacctggcgacgaggcgtattggaatcctgcctcccatgtcggtgtcggcaccaagcagcatccctgccagacggtggaggtcacagtcggcgggcagaaaccgttctgggccgctgtggatggggactaccgatgagacgccgcgcgtggggacgacttccggcagctcttggatccgttgcgtgcatgctggtcacgttgacagcatgttccccgttggatatgctcgccttcctgggcgggtgcaagaacacgggcggttccagcacggtacaggcgtcacaggcatcaggcgaatggacgggcctggtgggcaggcaccaggatcagatcaagcagatgtggcctgggcaggtgagtttctgcgcaccatacgattatgggttccaatgcacctggtgggcgtgcatgcggcagaagtcattgggacatgacatcggccagtattggggtaatggcggcgaatgggacacgagcgccaggaacgctggctgggagcagggcgcacaggcgggtggcattatcgtgttcaatccgggcgccggcggttccagtagcgtgtacggtcatgtggccgtcgtggaacaggtgaacggggacacggtccacacgagcgaagacgggacagggtggggcaaggtcgccacgcgctcgttcagcgcgtcccatcctcctgccggcatttcctactggcatcccaaaggcggaggaggcgccggcgcggaatcggtcgtgcaggcggattccccatcccactccggtccggcttctggattggctacattgtgttagacagttcgatgggggacgatcgacatgaggttggaggccgacgatggccgacccgaggcatccccgccactgcgaggagtcgttcaagcggcggatcgtgcggctttacgagaacggcaggccggcgcgcgagatcaaggacgagtacgacatctcgcgttccacgctgcaccgttgggtccagggcatccgcgacagcggctccgcgaaagccgccgacaaccgcacccctgagcggaacgagccggtcgagctgcgcaagcgcaacggacagtcggagatggaggtggacgtttcagaacaggcggcgccggtattcgcacgaaggtagcagtgatacgggccgacgcctcccgctgtccgatatcggcgcagtgcaggatgccgggcgttccccgctccgcctgctgctggatgatcgaacatcccgaagccgggcgggtggacccgatcgccggcgacgtgcacgcggtccggcgcgacagacgagggtgtctaattgtttgtgtatgggatcatctgatggaaaggaaacgatcatggtgaccgaggcagtgaagcctatggccggcgatgtggccgggaatgacaatggcgccgtgacggattcgcggtccctggtggactcgctggtcgcgtcgggagcgctggatcccctgttcgaacggatagacggcgggcggatcgagctcaccggcgacggcggtctgccgggcgagctcacgagggtcgccctggaacgcggcctgcaggccgagacgacgtcgcatctgggctacgcgcccggcgacggggggtcgaaggcgagcggcgggcatgcgaacttgcgcaacggttcgtgtcccaagacgctgtccacgccggtgggagaggcggccgtgcaggttccccacggcagggacggctcgttcgccccgaggttggtgcccaggcgttccgggaggctgggcggactggacgagatgatcatatccctgtacgcgggcggcatgacggtgcgcggcatccagcaccaccttgagaagacgatcggcgcggacctgagccccgagacgatatccaacatcaccgacgcggtgagcgacgccgtgctcgaatggcaggagcggccgctggacgagttctgtccggtcttgtacctggacgccgtcagggtcaaggtgcgcgacaacggcagggtgccgcccaaggcggcgcacatcgccatcggcgtcgacatggacgggttcaagcatgtgcctggcgtatgggtccaggacgacgggggcgcctccttctgggcgcacgtgtgcgccgagatggccaaccggggcatggccgacgcgctgatcgtgtgctgcgacgggctcaagggcctgcccgaggccgtggaggccacgtggcccaaggcgatcgtgcagacctgcgtggtgcgcctgatacgcgcggccaacaggttcgtcgccgaccacgacaggaagagggtgtgcgcggcgctcgggagcgtgtactgcgcgcccaacgggcaggccgcggaaaaggcgctcggcgagttcgcggaaagcgggctcggccggagatacccgtcggtggccgccacgtggaaacgctcgtgggaccggttcgtcccgttcctgcggttcccgcccatgctccgccgggtggtgtacaccaccaacagcatcgaatcgctcaactaccggctgcgcaaggtcagccgcgaccgcggccggttccccaacgaccaggccgtggtcaagctgttctggctggcgatctgcgacatcgaggacaaacgcagtctcagacgcgccgaaaacggcaacacaaccaggcgcgaaagcgagggaaggctcatcgaggggcgcatgacgaccaactggaaacaggccctcgcccaactcgcggccgcataccccgaacgaatggaaccctatttataaaacacaccccaaacacaaacaacttgacaagctccgacggccatgagcgctgcggcgccgggaagatcaaggccgcgctggagcggaggggcgtcaccgcctccggaaggcgcatcgtcaacatcatgaaacggcggggcatggcgggcgcgtacgcgcgcagaacgtccgaaccgcacaagacgcgggccgacgaggccgggctcgcgaacatcctcgaccgcgagttcgacggctacgggccgcgcgcccacctggccggtgacctgacgtacgtgcgcgtcggcggcaagtgggcgtacgcgtgcccgctcatcgacctggcgaacaggggcatcgccggccacagcgccgacacgggccgcgccgccgacctggtcatggccgcgttcgccacgctcgacttccccctgaccggggtggaggtgttccgcacggaccggggcggcgggttcgacaacgcgagaatcgacgagctgctcgacgtgttcgacatcagaagatcgccgtcagggaagggcgacccgtacgacaacgccgtggtcgaatccaccaacaggctcctgaagaaggagctcatataccggaaccactacaccagcccggaacaactacgctccgaccccgacgactatgtgtggtggtccgacaaccaaagactccactccaccctcgcataccggagcccgaaggaattcaccgaacaaggactcgtcctctaagaaaccgtccaacacgccgttgccaatccaacctttcgtctcgagctgcctgatactctgccggacacgcaccggcgtcgtcattcctttcatcccgaggaccatgtgctggtttctggcactcgggaatccatcaggaaccatacggcaccggcgcttttcttccgccgatgccgtttccagccgccgtccgcgtccaatatgaacgcttacgccgttcagatttggtggtgacgccgtacacgttatttgaccataaacacattggctccggctccgtggcctcgccgctcctttccctcctcatcctccaatgattggggatgacggacgacacagggtcggggtgatcggtgagcatgtagatcgctcattcgcagcatcgtttcatgtgctcttcggataggctcctgtgttggtcagtcgagcatgcgtttgaccgcggtgtcagcccctccctccagctggttcgtagtcgatggcagctggccgtccttcgcttgggccgggtcgcagaaggcggtatctgtgcttcgtgaggttgattcggcgggttccagacatctatctgcgtttcaaggggctggtggcaaagtagccggggcgtgaaaaccgcatgattccaatggccatcgggccgtcatacttcgaatatcgcgtttcggcaccccctcgaaacgcagatagatgtccggtgacgcaaaaatcaacccctcgaaatgcagatagcggtttcgaggggctgatttcttcggggggggggcgtcgtcactcgttgccgatgacactgtttgagttcaacgacttgttcaccagctccttgtagtccttcggcgactcggcgttggacgcggcacccagtttcttgttggatgcctgcggctcgggaatgtcgatggtgctcttcggcccgaggccggcatccgtgcggcgcatcatgtcctgccactcctcgtattccacgccgacgtagctcacgccgtcctgctcgaatgcgtacgaggggcagccggcggtgttcagcgtcacgctcttgccatagaacttctgcccgatggacaggaagtccgtcacggacatatcggtcgacaggcccttcgagaactgacgtaccaaatcaggccacttggtgaccggctgatccaggattttgttgatgatggccgtcagcacgatgcgctgcgcctgggctctcgagaaatcgccgccctggaccttgtagcgttcacgcgtgaagacgagtgtctgctcgccgttcagcgtctgcgtaccggccttcagggacccgccgccgttgccgccggagaacgattccggcacgttcaccgtgatgccgcccaactcgtccaccagtgccaccatctgactgaaatcgacctccatgtagtgcgtgatcggcactcccgcaaacttagataccgcgcggatggcgccagccgcgccgtcatatgagtatgcggcgttgatcttgctgacaccaccgctgatgctgaccatcatgtctcgcggaatagagatgatatcggcctgcgcacgtttcgggtcgacgcggaccagcatgatgctgtcgctgcggccgctctccttgttgctgcgcctgtcggagcccatgagcagcgcgtagaacgcgccgtccgagttcggctcgggcccggacagtgccgcctcggcctccgcgttgcgcatcgcgatgttctcgtcgatcatgtgcgcgtaccaccagattgcgatcacggggaagacgaccaggaccagcaccagggcgaggacgaccagaagcactgccaggcgacggcgcttcttctttcggccgccgctgcgcgaaccgcgcgaatgggaacgggaggatccaccgctgtggccactgccgccgctgcgatgcgcttcgccgccctcgtggccttcctgacccagaatcgggccggccgcgggggccggatccgccacgttcgcgagcatatccgcgtcattgtccatggactccccggcagtgccgccgtcggccgattccccggcttccgcctcttcctcggccatcttgcggaaaaactgctgaagatcgtcggtcatcttgtcaacaggtgtatttggcctgtttgcagtcagctgctctcccatctaggccctcgctgcgtaagcctgcgcccgcggcggaacacgtttgttccaactcgcgggaagactgaataccatcccccgcgaatctcctctaccatcataaacttacgcaatgattggacagtttatgcaggtcgcgcggctctcgccagcgaccgtgcggtttgtggcccttccatggcgacaacgcggttgtgatggtgacgcggtgacgatgctcatggcctgtggaagcgatgacatgctacctgggcgtatcggcgcatgacatggtcaggacggtaccgtatataatggcgtgaacgttgaatatgccggtgaaacggccataatagggaacagaaggccgggcgaatcccggaaagcggacatgaatcgggggcggatgatgaacgagcatgaagcgcatgagcgtgatatgcaatgggacgatgccggcgacggcgcgggactgcccgaaacaggggagcgtgacgctgtgcagggcattgaaccgggcgccgagcggcatgcggccgaatataaggccgtagcgctgggcgatgccgtggctgctgatgccgccggcaccgccacgagtgtcatcgggaacgtcccggttccgactgcggcagaaggcaagacggaacccgcggcacaggagggggccggtgctgccggacagcaggccgcagatgatgagggcatgcagttcctcgacaatcccgcgtgggacatccccgacgtgatgttcccctcgatgggcggcgtcaaggacgcttcatcggggagcggcccatcgtatggtgctcccagtccctacgttcccctgcctgaaccggaggacaccgtgcggccggtgcatggctctgcctccgatccgctggggctggagggcgtgtccgatatccccgccgtgccggaggaggaagagccgcaaggcaacaacgacgtcactatggtgatacagccgttgagtgctttccctacgcccacgcagagcgtgccacctacagccggaatgacgccgcagaccgtgccactgccgcctgaggcgggcgcggcggtgcctcctcatgggagcggagagccgggcggcaaggcggacggcagttctcgaaagcaacatggccaccgccgcgctatcatcatcgccgtcgtcgcggtcgtcgtcgtggcgctcgccgctacgggcggattcctgtggtggcgccacatgcagaaccagaacgagctcgatcaggcggctagcctgtgcaagacctcgaagaccaaggccgacaaggcgttttccgaattgcagtccgcgctcagcgaagccaagcctgcgcagcagattccgcaaggcgatgtgtccgatccgaccgtcctggagacgctgaacagcgcggtcacaaaggcgtcctcggccagcgagccggtctcgtgcgacgtggcgttgggcaccgagacgctgaacgccaatgccagcaagaacaagcagatcgcgcgcgccagcaccaaggcgaagacgaacgtcgccgaggccaccaaggctgtgaacgacggaaaggcggagaaggtcgagtttatcaagcatgaactgcagacggccgtcaccggcgcgcagaagatttacgacgacagcaagggcgttgtgctggacgactcgaccaggaccacgctgcagtccgccatcgatcaggcgaacgcgttgctgcagcaggatgacgccgatctgaacgagatgcagcagtctatcaccgatgtgaaggacgccggagacgcggtgaccgtgtcgatgaacgagtacaccgcccagcagaagtatctggagcagcagcgccagcaggagcagcagcgccagcaacagcaacaacgcaacaacaggacgaccagaacgacaagggcgacgacctgaacggcagcacggattcgcagatcggtgattcgcggggtcacgagacccagccgacccacccgcaaggtagcgacgactgatagatggtgattggcggtcggccatcctgtttgaccacccccagtcgcttcgcgtcagcccccgctggtgggggcattactctcgcccccgatggcgggggctgacgcgaagcgactgggggtggttcatatagactgcccactcttgtcggctctgccgtgaacggcaggttattttgcgtcgttatgtgcgcgtactcgtcgtttcggcgcgcacataacgacgcaattgcggccaattcgtagttgtcaggctctcgcattgcgatcggctttataggtgagtcttgcgacaacaaaaaccggcccccgcaggagccggttgaagaaacgatagcgcgcccgccgtcagtagttgctgttggccttccagtaggcataggcgccggtgatggagccgtagcgctggttgcaatagttcacgaaccacttgaactgcgtctggtagttggtgcgccaatccgcacccgcggatgccatcttgttgccggggagcgcctgcggcaggccgtatgcgcccgagctcgggttcgtggcgttcgtctgccagccggactcatgattgatgatgaagttggcggcggtgaagtcggcctcggtgtaaccgttcgccagcagccagtcatgcgcccacttctgcttctcgccggagggaacggtgtcaccgagcgtgttcgcggccgcctcttcggcggaaccggtgccgaccaagatcaccttgtcgacaggggctttcttgacgtacttggcgaagacggtggacgagacgaccttgcccgcggagcgagtgaccatgctggtggtctgcagcacgccttcctgaccttcggtctgcaccttctgctgaccctgcggcaggctggtggtctccttcttgaccgtgttgaacgcgatggcggtctccgaggtctcggcctgcgtgtcggcacgcgagatggagatgaccgtggactcgtccaccttcgtggtcagggccggcgtgacgctgtcttccggctccaacgtgatgttgcccgcgtccagtacggatttgacgtcggtgaaattgtcgcccagcacgaagcgggacttgccgttgaccttcaccgtcacatagctggtgttggcgtcggcgccacgcagatccgcgcggttgttgcttcgcgagacgctgcttccggcgaggtcggcggccgagtattcgttgaccgtggttccgcggccacggccgatgtagaagtttcgggagacgatgccggccgcaaccaccatgacgatcgccgcggcgatcgctacgatgcggatccactggcgtttgctcagcgacagcagcgttggtgcattggttttgcgatggctggccattatgctccttgattgacggacaatcctcggcgaatccggccgtcaattacgacgggcgggtgatgcgtcgacgctggtgggcgccgcaccggagtacacatcaaatccaagtttagaccactatgacgatcttgtgaaatcttggagccggcggattccgcgttccgcccgcgcccgtggcaccttcgcctggccgccggcgcacgaacgcggaatccgccgggaatcgtcggttattcggcggaagcggccgaatcctgcgcggcggcggaaacgtccagcgccttcgcctgcgcgatcaggtcgtcaaggtcttcggcgcgcagcgcgccggcctgcttgaagatgatctggccctgcttcgcgatcatcagcgtgggcactgcctggatgccggccgcgctggccagatcctggttcgcgtcgatgtcgaccttgccgaagacgatgtcggggttctcctcactcgcggcctcgaacgtggggccgaacgcgcggcacgggccgcaccaggtggcccagaaatccacgaacaccaggttgttgtcggtgatggtcttctcgaagtcctgcgcattgagctgaacggttgccatgatcgtttcctccctcgttgccatggtgatgttcccatccgttgtcgtcccccagcatcccagcaccactcaacaaactacgccgacggacgaatgcggacgcccgcatcgcgcgttttccgtgattcacatcgcattcgggaatccttgtcgaaatcgacacgttgtcgtcacgcgagttgggcgataataagaccatgccagttttgaatgacgaagtacctgacgagggcgatttcgacgccggccgccggcgcggcgaattcgatgacatcacgcccgaggatttcatccgcgggtccggtcacggcaatccgcccggctggctcggtccggccgacatcagtcgtgcccgtcggcagctgccgatcgcctatgtggagatcgtcccgattcgcactgacgacttgggcagggtctcccggatcggctccttgctgcacgtttcggacgacgggtccatagagcgcacgctgatcgccggccgcgtgctgttccatgagagcatccgcgaggccatcgcgcgcaacgttgccaaggatctgggcgacatagcgctgccgatgctgccgcagagcctgcagccgttcaccgtagccgagttcttcccgacaccgggactaagcgagtactacgatccgcggcagcatgcgataacgctgtgctatgtggtgccgatcgccggtgactgcaagccgcaggacgagacactggacgtcgagtgggtcgatccgcgcggcgagataatggagacgttcatccggcagatgacgaacggacatgaccgtatagtccgtcaggcgttggcctggctggatttgtgacgtgccgtctctccatccggccggtccgcgagaggacgcgggtcggccggacggcggcatgatcggcgggaatgggccgcggacggcggccgacgacagtggctgacaccgggcgatgaaacgatgacgatataggagcgcaacgatgatgacgctgagcaatacggtatacgcgacgggggaagggacaccgctggtgctggtgcacgcattccccgtcgaccaccgcatgtgggacgactgcgcggagcagattgtccggcaggcgcgggagacgggcgacccggcggtgacagtgtgggcgccggacatgccgggcgccggggccgggccgattcccgagccggccgacagcgggcgggtggcggccgacggggcgctcacggacgcgctcgacctgatggccgacgcctatgtcgatctggtgcgtgccgccggctacgacaaggccgtatgggccggactgtcgatgggcggatacgtggtgctggacatccagcgccgccatccggacatggtcgcgggactcgcgctgtgcgacacgaaagcgggcgccgatggccccgaggcccgcgcgaaccggctggcgtgcgcgagcgaatgcgaggcgacgcaaaccgtgaagccggtcatgcatttcgccgatgcgacgccgtccgattcaagcttcaagcagtccgatgagggcagggcgctgttcgcccgctggattggcgagcagacgccacagggcgtgggttggcgtcagcgcatggccgccggcaggcctgacctcagcgatcagctgccgctcgtcaccgctcccgcggcggtgctgtgcggcgacaaggacccgttcagccccaggccggcgatgcgggcgctcgccgatgcgatgaccggcacgtcgccgagtttcacggtcatcgaggattgcgggcatttcagcgcggtcgagcatcccgatcaggtggcgagcgcgttgctcgatctggtgcgacgcgtgcatctgcgcgactgattgcgggcgcagtcggccggacacggcatccgcggtgcggtggggccggtggcgccggcggtgtgacctgccgtgacgatgattgacgatggatacatgaggagtgtgaagtgatgttttcaccattggcattgacccagacgttgccgttcctgccgctggcgcagggcgacatcgattatcaggtcgcccggcgcggagatccggacctgttcgacacgctgttcgccgaccccgtcaccaaggtcatcctggtgcggggcggcctgctggccgtgccgcgcggtcagggcaatgccgtcaactatgcctccgcgaacatgaggctgagcacgctgccgggcgcgtacgcgggctccgccctggctgtccaccccgaagtggtgccgatattcctgggatcgtatggcgcgctgcgcaacgagcatgtggtggcgctcgacatcactcggatgtcgacccccggcgcggcctcggcgattccttcgccgtcgctcggcgccgacgcggcgtttgatgccgacggcaatgctcccggtgcggtcgcgcctgacagactggacatgctggaacaggccgtggaacggttcgactgggtggatctgcgcgggttcgccgcgcacgccaacgcccgcgaggccggacaggccacgaccgcggtgaccctgagcatatggtacgccgggcagcggttctgcccctcctgcggggctccggtcaaggcggcgatgggtggatggtcgcagcggtgcacgaacgcgggcgacgggaaccgtctgctgttcccccgcatcgagcccgctgtcatcaccgcgatcgtggacagtcaggaccggctgctcttgcagcacaacagcgcctggcgcaatccgctgctgtactccgtttcggcgggattcgtcgaggcgggggagaaccttgagcacgcggcacggcgcgaggccaaggaggagaccggcatcgacctgggcgaggtgcgctatctcggctcccagccgtggccgttccccgcgtccctgatgatggcgttcaaggcgcaggcgttgagcaccgacatcctggtggacggcgaggagacggagaccgcgcgctgggtgacccgtgacgaatacaccatcgaattgtcggagggccgtatggaagctcccggcaaatccacaatcgcccggtacatgattgaggagtggtacggccgcgaactgtgacatgcgccgcacgacaatgattcgtatgtctgccgggtgttatagtgaagccagagagtcgaagtaaaggaacaggaatggctaacgaatacacgggagacgataatcaggaagatgagcgcacgcaggcagtcttcccgctggatgatcagatggacatcccgcctctgaacatgcccgtccttcatgacgggtcgacgtttgacgctgagccttccggtctggcgggtctggtccaggagactcaggcgaagcggcaggcggatgcggcctccgcacagacgcaggagtcgcaggagactcaggctttcgacccgttggccgagctggacgatgaggccgctcctgagccgcagcccgccgcacctgcgacttcatcctttgtcccgcagcgtcccgccgcggacgacgtcgcgaccgtcgccttcgccgcggtcgccatgaacccggccgatgacgccgcgctgggcaagggcgtgtccgcggccaagacgaagaacccgaagcgcggcatgatcatcgcgttcagcatcatcggcgcactgctggtgctgctggtggccgcattcttcggcacgaactggtatttccaggaccgcgtcgccccgggcgtccgattcggcaacgtcagcgtcatgggcaagaccgaaagcgagctcaccggcatcgtcaaccaggccgtgtccgattcggccatcaccgtcaccgattccgagggcaacaatgtcaaggcgggcctcgacaaactcggcgtgaccgtcaacgtcaagcagaccgtgcgcaacctgctggacgcgaaatccggcaacatgttcacccgcatcaacccgttcgccaagcaggacgtccggctgtccgccacgaccgacaactacaagctgagcacctacctgaccgagcagctcgtcgaggagcaggatcgcgcggtcgcctcgaacatcagctacgacgccaactccaagaagttcatcgtcacggaaggcaacgagggcaaggaagccgacccgtcggacgtgatcgcggccgtcaagaaggcggtctcccagcccggtgaagcacaaaaactgagcgtcatgtactccgacgtcgccatgcccatcaccgtcgaaaccgccacgagcgcggcgaacgacgccaacaagcgactgacgtcgtcgctggtcatcggcaactccaagggcaagacgttcacgcttcccgccgatgagatagccaagtggatccaggtcaagcccgacatccagaagggcaccatcacgctggcatacgatcaggacgccatcaagacatacctgtcgcagaacctcgccaagaaactcgaccaggacatggtcgtcgagaagaacatcaccaacaccgacggtaccgtgctgaccgtgatgcagaagggcgtcgacggcgtggccgtccaaagcaccgacgagaccgccgcgcaggtgctcgacgcgctgaacgccggcaggggcgcggagctcacagccacggtgaaggtgaccgaccacaagaccgaaagccgcaaggtggactacacgtcgcccaacggcgaccctcacatggtcatcaatctcagcgagcagaaggtgtacgcctacaagggctcgaccctggtgaagaccttcatcgtctccaccggcaagccatccacgccgaccgacaacggcacgttcttcgtgcacaccaagtaccagtcgcagaccatgcgaggcgaaggctacgtcacgccgaacgtgccatgggtcacatactacaaccagggcgaaggcttccacggcgcaccgtggaacaccgcgggcatcgccagcggcactccgaagtcgcacggatgcaccaacatgcacgtcgaggatgccaagtgggtgtatgacttcctgccgatcggcgccatggtgcagatcgtggggaccacgccgacctccgccgtgcgctgattttcaggcgattgcgctgactataccgctgatgccggccccgccgatcattgtttccgagcggcggggccggctgcgttttcggggcctcgccgtccggctcagtgtcagccccatcgataagcgctgtgcggtacactggggggcatgagtgacgagaacgcaatcgacaacccgttgaaccttgacatccccgatcacctgcagtattcggaagagcacgtgtgggtggacgattcggtgtccccggccatcatcggcatcaccgcgtacgccgagcagcagcttggcgagctggtcttcattgacctgccggacgagggcacgcgcgtggaggccggcgacgaggtccttgagctcgaatcggccaaggccgtcgaaccgctggtctgcccggtcgccggtaccatccgctatgtcaaccatgacgccgcggacgacccctccgtcgtcaacaacgacccgtacggcgaaggatggctgctgaagatcgagctggacgatgacgagccggaactgctcgacgccgaatcctacgcgaagatcgcccagtgaccggcaccgccgtcggcgaccgacaacgcaagccggcgatggccgacggtgacgaaggtacatgacgacgacatatccgacggatatatttgacatacagctaacgtgataacggatggcggaacccatgagcatcgcacacgacaacacaccacgccggggcggagcgcgccctctcggcgggcgggatgacgggctgcggcatgacggcccgatacatgacggatcggatccggacaacgcggctcacgacccgtccgggcagaccggctccccgcaggacgacatgctcaccgtgccgattcccgcacgcccggtcgtcaccacgttcgacgccgcgtcgcggcacgagcgcatcgaggtgcagccggtactggtgcgccgcatgcgccgggccgccatcggcacgttcggattgtgggtgcgactgtccaccgccgtcgcgcgcaagctcgactggttcccgcgtgtggacccgtacgtcggctatggcaccgaggtctactctaggctgatctgccgcaccgtgtacgcgcccaagcacagcaacgccggcacactgacacgcggcatcaaaggcatgctggcgattcccgcgtcccgcgtgcaggtgcgtatcagcatagacgggacgccgctggaaaccgtgcagatcggcgaatccgagcgatatgacgaattcaatcccgtgcgagatctcggcagcgaatacgcggtgtccgacgaaagcggatacctcgatctggtggccgagcatcagctggagaccggcgttcaccgcgtcacctatcgcgtgaaggggcggccggaggtctcggcgagcctgttcaccatcccctccagcgcgaaggtcggcatcatctccgacgtggacgacaccgttatggtcacgcaggcgccgatattgtggaaggccgcatacaacctgctgttcctgaaccccaagaagcgcaactccgtgccgggcatgagcgtgctgttcaccaaactgcaggacatgttccccgacgcgccgttcttctacctgtcgacgtccccctggaacgtggaaggatcgatccggcatttcatctcgtatcacggcttccccgaagggccgctgctgttgcgcgacctcgacccgcgcccgaagacgttcgtgccgtccggtccgcagcacaagctggagttcgccgaacagctcatggcggacttccccgacatgcggttcatcctgatcggcgatgacgggcagaaggacccgaccacgtatgcgaccatcgctcggcgataccccggccgtgtgctggcgatcggcatacggcagctgtcgccccgcgaggccacgggtctgtcgtcgatgatgggcatgacctcgacgcagccgatgcccgtcaccgacgtgccggtgttcaccggcaccactggttcgaacatcatgaagaccatgctgccgtacctcaagcagaaactcggacgaacggacctggcggagtgacttcccgaagagcgaagttcgccgctgtctcaagtcgggccgtataatcacgagcatgacagacgaaacgaacggcggcgtcgccgcttgccgacctcccatcgcccggcgtgaaccggtgaagcgcgtgttccacggggacgccgtgattgacccgtatgaatggatgcgagacaagcagtcacccgaggtgcgcgactatgtggccgcgcagaacgcgtactgcgacgcccgcatggcggggctggcggggctgcgcggcacgctgttcgacgagttgaaggcgcatgtgcaggagaccgacatgtcggtgccggtgcgcatggacggatactggtatttcgcgcgtacccgcgaaggcagccagtacgccgtgcagtgccgggtgccggtgcgcggcgaggacgattggacacctccggaagtcgggggagccggcgatgagggcgggagcgccgtcggagccggttcgctgccgggcgagcaggtggtgtttgatgcgaaccgcgaggccgaggggcatgatttcttcgcgctgggcggcctgtccgtcagcaaggacggccgatggatgctgtacggcgtcgatacgcgaggtgacgagcggtacgacttccgcattcgtgaccttgacacgggcgatgagctgccagagcgccttgacggcatcggcgcggcatgcttcacgccggacgcgcggtgggtgttctacgtgacgcttgatgatgcctggcggccgtgcgaggtgcgccggcaccgcgtcggctcgccggtcgagcaggacgaagtcgttttccatgaggacgacgagcggttctgggtcggggtcggcatgagtttcgacgagcacagcatcgtgatctgctccgcgtccaaaacttcgtccgaagtgtggatgctgccgaccgcgacgccggaaggcgagttctcggtgttcatcgcgcgcaaggacgacgtggaatatgacgtgagcttcgcatgcttcgaaggtgccggggctgacggggccgatattccggttgccgtggtgtaccacaatgctcaggatccgaacttcgagatcgacgtgatcgacatgcgaacccatcagccgccgtatacgctgggagaaggcgtgcgcgtggcagtcggctcgccatacgggtgcgcgcgcggcgacgacatggaggcgggcgcgggcgcgaagccggccgggacggcctactcgaatcccgccaacccccggatattgcagggggcgcacgggctggccatcgagggcatcgccatccaccggcatttcgtgacgctcgcataccgcacggacgggttgccgcacgtggcggcgatgaccaagacgcaggcggccgaagacttcctcgccgggcgtgcatggtcgttccgcgagctgatgccgccggcgctggacggcgactgggacgtgcccgggcgggccgatgacggtgcggccgaggccgcgggcggaacgctgccgggagccacccatcgtctgtactccatcggaacgggcggaaacccctcgtatgatgcgccgcgcatgcggtacacgttctccagctacacgcggccgggcgaactgcatgagtatgatccggcgaccgggcatgacgagctgctcaagcgggcgcgggtgctgggcgacttcgatccgcgcgagtacatggagcgtcgggtgtgggtcaccgctcgtgacggcgagcgcatacccgtgtcactggtgtggcggcgcggccatgagccggccgctgccggcgcgatgttcatcaccgggtacggtgcttatgagatcagttcggaccccggcttctcagtcgctcgcctgagcctgctcgaccgcggcgtgctgtacgccgtgccgcatgtgcgcggcggcggcgagatgggacgcgcctggtatgagcaggggcggcgcctgaacaagcggcacacgttcgaggacttcatcgacgtgaccgccgcgctgcaggacgcggggttggccgatgcgcatcggacggtggcgtacggcggttccgccggcggtctgctggtgggtgcgattgcgaacatggcgccgcaactgtatgcgggcatcgaggcggatgtgccgttcgtggatgcgctgacgtcgatcctcgatccgtcgctgccgctgaccgtcaccgagtgggacgagtggggcgatccgctgcacgacgcggacgtctaccggtacatgaaatcgtattcgccatacgaaaacgcgccggagggcgcggacggcgaggccggttcgggcgcggcgtccacgcggtctttgcagaggcaatcgtcgcggccgttcccgcgtatcttcgccaccacgtcgatgaacgatacgcgcgtgctgtacgtcgagccactcaagtgggtgtcccgactgcaagccgccggcatcgatgcgatcatcaagatcgaagtcgaggccggtcatggcgggacctcgggccgctacaagcagtggcgcgaagtcagctacgaaaacgcctggtgcctctccatcatgggcctgacccgctagccgcggccgacgtccgtccctgattgcggggcttccatatcgccccccccgctggcgggggggggatatgattttggggcccgcgggtggggatcatatggttgttccggcattcggactttgctgtgccggatagtggaatgaatgatggttcctgtgccataccacgtcaaaaacaccgttttttcgcgtggtgtggtacaggaccttgccacagaatcggttttaatcggttgcatgcgctcttgtggtacaagaggaatatcaaagatccttgcaaaatggccgatttcgctgtgaagcccggaatcggccatatcgggcgtgtaccacaccacggtcaaaatagcgtttttcggcattctgtggcacagaccatgccgcacagaccatgcgtgaagatcacgtcgcctccaccgtctgtccactagacggactgggcgcattgttttcgagcacggccacataccctgttggctatggcaaagaagtatacaatcgccgttatccccggcgatggcattggcaaggaagtcaccccctgggctcagaaggcgctggaaaaggccgctgagggagtggctgatttcgaatacgagaatttcgacctgggtgcggagcgttatctgtgtgatggcgcgatcctgccggacgaggagctggagcgcatcaagaagaccgatgcgatcctgctcggtgctgtcggtgacccgcgcatcaaggccggcatcctggagcgtggtctgctgctgaagctgcgtttcgcgctcgaccagtacgtgaacctgcgtccgtccaagctgtacaagggcgtcacctcgccgctcgcgaaccccggcgacatcgatttcgtcgtggtgcgtgagggtaccgagggcctatactgcggtgccggcggagcggttcgtcgcgacactcctgccgaggtcgccaccgaggtctccatcaacaccgcgtacggcgtggagcgcgtggtgcggtacgcctatgagctggcgatgaagcgtcgcaagcacatcacgctggtgcacaagaagaacgtgctcgtcaacgccggcgacatgtggcagcgcatcgtcgaccgtgtcggcgaagagtacccggaggtcacgcacgactaccagcacatcgatgcggccacgattttcctcgtgtccgatccgtcgcgcttcgacgtgatcctgaccgacaacctcttcggtgacatcctcaccgacgaggcaggtgccgttgttggcggcgtcggctattccgcgtccggctgcatcaacgcgagcaacgagtatccgtcgatgttcgagccgattcacggttccgcgcccgacatcgccggtcagggcaaggcgaatccgaccgcggccatcctgtcggccgcgatgctgctgcgccatcttggcttcgacgatgccgcggcccgcatcgacacggcggtcgaggctgatatcgaggagctgggctccaccgttcgctccaccgatcaggtcggcgaggatattctcgctcgcctgtaacgcggcggtggtgtgaaccaccccagtctcgttttgctcgacagcccgccagcgggaccgagatataggcccccgctggcgggctgtcgagcaaagcgagacttcgtgtatcggggtttgagacgaccacgcggacagattcggcgtgtaacgtgtatcgggtgaatatcgaaagtcgtggggaatgcaagcgcccgggcggcaagctggtcggggtgacagtggcgtgcgcgccggataacggccacgtcgtcggctgtcgcgtggacggtgattttttcgttgaaggtgacgatgccgcggtcgacaggtatctgcgccgtctgaatgcggcgcttctcgatatagtgcagcgtgatataacacagtgcgatacgccgcccgatgatccggataccgtctcctatcttgaacgcatcgcacgcgatgagcatgtatccgttaccggcgcgaatgcggaaacgatactgaccgcgttgcgccgcgcgctgtcggcttgcggccgggacgccgcgcgaccggcatcctcgcgcctcgcttcgcccgcctccgcgacggcgcatgacgcgcgcaggcgtgcaacgccgtccgccgcatcggctgttccgacctcgtctgtcacaattacgccggcggcctcggcgcctcaagcgtcccgcggtctcacaccgccggcattccccggcgagtggcacgaacgctggcatcggctcgcgccgaaaatcgtcgtggacaagccccgcaggccgcaggaacagatggatgtcgacgtgcaatggtcccgtgaggtggccgcgggggagcgccctgccactatccggttctggcagtgggcgtccccggccgtggtggtcggccggttccagtcgattccggacgaagtgcacgaagacgtcgccgcgaaggagggtttcacggtcgtatggcgctgcacgggcggcggcgcgatgttcatcgagcccggcaacacgatcacgtactcgctgtacgcgccgcgctggttcgccgcggacctggacatcgaggaatcgtaccgtctgtgcgacatgtggctgatcgccgcgctgcgtggcctcggcctcgacgtcggcttctccggtctcaacgacatcgcctccagccatggcaagatcggcggcgcggcccagcgcaggttcccgcccatcggctccggccccggttcgatactccaccacgtgacgctcgcctacgatatcgatgccgtgaagatgacccgcgtgctgaacatctccggagagaagatgtccgacaaggccgtgaaatcggccgtgaagcgagtggacccgatgcgggcccagaccggtctgagccgcgacgggctgattgcgcgtctggcggactgtctgacgcaaccggacggtcccggtgcaaactaggctacaatatgacagaaccgaccgaagacagagacgcgacgggttggattccgtcgcgaggacgccgatgcggatgcggtggcggatggtgcgccgtcgtcgcgatatcgcaggggctccgtgtcgaggtgccggcatgtcggaaacgtgaccaggaggcgtcatgagggcaatcgggccgaattcgttccccgaagaggacaacgagctgttgcatacgccgttgttcaaacaggtgtcgccggagcaggccaatgagctgattccctacctgcacgaggccgtattcgacaagggcgactatatcttccgcgagggcgacagggaccaccgcatgtatctgctggagcgcggccgcgtcaagctgatccgcgaatccaaggacaggcgcgtgcagctgctgtcgatccacgcgcacggcgaactgctcggcgagattcccgtattcgacccgtccggcggcccccgtaccgccacggccgtggcgatgacccacggcacgcacgtggcatggctggagcatgacgcgttgttcgcgtggctcaacgagcacccgcgcgtcgccatcgacatgctgcaggtgctggcgaatcgcatgcgcggcaacaacgagcgcatatccgaccttgtgttcatggatgtgcccgcccgcctggcgaagacactgctcaacctcggcgcgcggttcggcgagccggtggaagccgggctgaaggtgccgcatgacctgacgcaggaggagctcgcccagttggtcggttcttcgcgcgagacggtgaacaaggcgctgatggatttcgcgaaccgtcggtggatcgcgcgcgagggccggtcgatcatcatctaccagccgggcatgctgattcggcgctcgcaacggtgacggctgcgccgagcgcggtgaacgcccggcgttccagcggccgttggagaatgattcggcttgtttccggtcgttttacagtcttctgaccggtttgtgagtaccctgtgagggattgggaatcagtcgttcggatgacgtgcccggtagagacgcccctctagaatggcaaccatgcccaagaagaaatccctgaccgcaaaacgtgtgttgtcgctgttcctcgcgtatgtgctgctctgtctcgccggaggcgtcgtcaccagcgcgttcttccttcccgccgtgttcgcatcgaacaacgtggtgcgtgccatcgtgccgtcgctgcaggtggagggcatcgatttcaacgtgaccgacctgccgcagcagtcgcgtctgtatgcgtcggacggtacgacgcagatcggtacgttctatgcgcagaaccgtatcgtcgtgccattgaagaagatttccaagccgatgcgccaggcggtggtctcgcgtgaggaccgtcgtttcttccggcatgccggcgtggatatccagggcgtgatgcgtgcgttcgtggcgacctacgtgaagaagggcgccactcagggcggttcctcgctgacccagcagtacgtcaagaacgtgctgctgctgcaggcgcaggaggacaacgatccgatcgccgaataccatgcatccgaggagaccgtggcgcgtaagctgcgcgaaatgctcatcgccgtgcagatggagaagacgtattcaaaactggagattctgcagggctacctcaacatcgcgcagttcggccgtggcatttacggcgtggaaatggccgcgcgacgatacttcagcaccacggctgacaagcttgacatcgtgcaggcggccaccatcgccgcaatcacgaagaacccggcggccttcgacccttcggtggagagcaaccagaaggcctcccagagggagcgcaacatcgtgcttgacctgatgtatcaggaagagtacatcagccaaaagcagcgtgacgaggccaaggcgaagccgctgaaggacacgctgaaactgcaggatgcgcaggcggggtgcagcgcgtccggcgacgcggcgttcttctgcgactacgtcaccaagaagatcctcaactcgaaggagttcggcaagaccatcgaagagcgcaagaagctgctgtatgagggcggcctcgacatctacacgacgatggacgtcaatgcgaactctgcggcgatgaaggccgcgcgtgcggccatcccggcggacgacgcgagcaagatggaagtgatgatggcggccatcaagcccggcaccggcgaggtgcttggcttcggcatcaacaagatatacgacacgtcgccggaagcgaacaacgatccggccagaaccgccatgaacttcgccgtggaccagatagacggcggcggtagcggcttcccggtcggctccacatggaagccgatcaacctggtggcctggatgcgcaaggggcactcgatcaacgaggtgctaccggctccgggcgtcgtgaacctataccgtgacattcccggcttccgcggcgtcaatacctgggacgtgaagaactccggcggcacgcccggatacgcggaatccccgctcgacggtctggtcaactcgcacaacaccacgcaggccgccatggcgaaggtcatcggcctcgaacccatcgcgcaggccgccgaggacataggcttccatcaggcgtccaagcagaagatgaacatgcatctgaaggacgacaccgcgaacggcggcgcctatcaggccccgctgatcatcggtggtacggtgtccgccgcgccgctgaccatggcgaacgtgtacgcgaccatcgccgcgaagggagtcgaatgcacgcccatcgccatcaagaaggtcaccgacgccaccggtgccgagcttgacgtgcccaaggcgaactgccatcaggccgtcgacccggatatcgccgaaaccgtcgcctacgcgatgaaccagggcgtcgtgcgccccaacggccaggcgaggaccgcccagctcgccaacaaccgcaagacgttcgccaagaccggtaccaacgagaacacgtacatgctgacaggcggattcgtgccgcagatcgccgcgttcgtcgccgtgggcaacgccgacggcaacagcgacttcgacaacaagaccattaacggcgtataccaccgcacatggttcggttcctatatcgcgaccccgacgtggaagaacttcatggacacgtatctcaccgcgatcaatgcgcccaacgtcgattacggcacgccgtcaagcaagtacgcggcgacctcgaattcgacctcgaaatcgtcaaggtcgagtaccaacacgacagacgggacgaccagcggaaccggcggaacgggcgataccagcggccagtacacgcagacgcagaacgacacgaccaccggcggcaatcagaccgagggcggccagaccaccggcgggcagtgacgggcggtggttcggcagctgagccggtgagctgagccggtgagctgagccggcgggccgatgcaccgaaagcggcggttcgccgcgtgagtcaggggccgtatgagcatgaacgctcatacggcccctgcctgatttccgacgctttgcgcaggcggagaacatcggtgcacgagtcgtgcttgagtctgtgcgcggtgagatgattagaccggtggttgcctcgccgtggtttggaagcatcccgacttcccggctcgcggattgggagccatgcgaattgtcgaggaaaggacgaccatgaacgctgaggggaagaagaaggccaagggcggcaaagggggagtgcagctgttccagccgatgacgttgcgcggcgttaccatgcgcaaccgcatctggctgccgccgatggacacgtattcggcggtggcgcgggacggcaagcccacgccgttccattaccagcattatgtgtcccgcgcgatgggcggattcggcatgatcatcgccgaggccaccgcggtgacggccgacgggcgtatctcgccgcgcgatgtgggactgtggaacgacgatcaggtcgccgcctggcattggatcgtcgacggcatcaagcaggccggcgcggtggcggccgtgcagctcaaccatgccggacgcaaggggtcgaccggctgcttcggcgtcggtttcgaggggaagagtgtgcccgaggatgccggcggatggcgtacggtcgcgccgagcccgatcgcgtaccgtgggctcaccgatccgcgcgcgttgagcgtcgaagagattcacggtctggtttcggcgttccgggatgccgcgcagcgtgcggtgcgggccggtttcgaggcgattgagattcatgcggcgcatgggtatctgatctcgcagttccttgacccgctgtgcaacgagcgcgcggacgagtacggcggcgatatccacggccgcatgcggttcctgctggaggtcgccgatgcgattcgcgaggtgattcccgacacggtgccgctgctggtgcgcatttcggccacggactgggccgcgggcggctgggatctcgatcagacggtcgataccgcgtgcgtgctgaagcagcacggcgtggacctgatggatgtgtccaccggcggcatcatcgccgacgtgagcattccggtcaaggccaactaccaggtgccgttctccgatcaggtgcgcgaacgcgccgcaataccgaccaccaccgtcggcctgatcaccaagccgaagcaggcggagaagattctgcgtgcggggcaggccgatgcggtcgagatcggccgtgccgcgctgcgtgacccgtactggccgctgcgcgccgccgccaagctcggcgtgcccgtctccaaggcaccctaccagccgcagtacatccgcggcgccttccctgaggactgagcggcagataaacgtagaccacctccagtcatgctacgcatgactggaggtggtctacggctgtgtcgatcaggcgtcgatgccgacggcgtcgctgatgtgttcgaagccgtcgcgcttgaggagcgccgcgaggccgcgcttgagtacggtgatctgctgcggtccgcggtacatcagtgcgctgatgaacatgaccaggctggcgccgttgcgaatcttgcgatatgcctgctgcggggtgaacacaccgccgatgccggcgatggcgaaacgctcgccgtattcacggtagacctgcgcgatgcgctcctcgctggccaccgtgcacgggccgccggacaggccgccctcccactgctgcggaatctccaggccggtgcggtccttctggaggttggcgatgctcagcccctgcacgttgtgctcggcaagcacgtcgagcaggtccttgaactcgggccacgtcttgttgagcggcatcttgaccagcgtcggctgcgggcgttcgatcttgtcgagctcggtgaacaggcggtcgagcgcgtccgggtcggcggtgaacggctcgccggcatgggtgttcgggcatgacacgttgacctcgaccatggcgctgcgtccggccgcgcggcgcatggagatgcagtagtcctcgatgccttcgtccaggtcgccgcacttgtcgtcgttggtgcgtgcgatggagacggacacctgcatcgtcttcgcgttcgtccacgcctgctccgcgcggtcgatcaccttgtcggacccgtcgttggcaaggcccacgtgcaccatcatcgaatcgtattccggaagacggtggaaccacggcttcgggttgccggcgctggcgcgggaggtcgtggagccgaccgtctcgaagccgaagccgacgttgtccatgagcaccggcatgtcgcagttcttgtcgaggccggcggacaggccgaacgggttggcgaagtcgacgcccatcacggtggtctccagcacggggtcggtgtagtcgagcatctcgcgaagcagccacatgagcggcgggatgcgcttggtgacgttgcagaactcgatcatctggtcgtgcgccacatcgggggtgtggttgaagacgaaattgggtttgatgatgttcttgtaaccgaaagtgaacaggtcggtggttgctttgttcaccgcgtcgtgccagaagttttccgaaacataagccatgccctccattgtgtcacgcacgcgaaaaaacggcaacgatgcggttgcgcgggtgcggtcggatccggcgggtgggggagagtgcggtaaaagtgatgttttgttcgtttttatggaagtgatgtgcgcaacacgcatgtcaaacattacgaaacgcacatattggtttggtttatgcgcgaacatgtgcgataatgttcacatgatatcctcacaacgtcaacatttgatactgagccgtctgcgtacgcgcggcgcagtgcgcatcacggcgttgtctaaggagctcggcgtttccgcgatgaccattcgacgtgacatcgccgatctctctgacaaaggtctgctgaaacgcgtgcatggcggtgccgtcagcaccagcgcattgctcagcgagccgctgttctctgtaaagtcgcagatggacattggtctcaaggacgccatcgcacgtgaagcggtgcaatatgtggcccccggcgatgtgatcgccataggaggcggcaccacggcctacgtgttcgcgcagcatctgctggaaagccagcaggcgtcgggcatcaccatcctcaccaactcgattccggtcgccgagctcgtgcaggcgttggaatccaaggatgtggaggtgatcgtaacgggcggtgtcaccacgcggtcgaactcgctggtcgggccgatcgccgacaaggtcatcgcgtcgctgcgcgtcaacaccgtgtttctcggcacccattccgtgtcgattccccgtggcttcctcatgccgaactcgctggaggcggccaccgacatggcgatgatgggcatcgccgaccgtacggtcatcctgaccgaccacaccaagtggagctgtacatcactatcgttgttcgcccggttcgaccaggtggacacggtcatcaccgacgatggcctcgaccacgagtccatcgccaagacaagggatttggtaaaggaactcgttctggcgcaccagagcgaacacaccgaagaaagtgagtgacaccatggcagaaatcaccaactacaccccgggagagtatgcgaaggagcatatccgcatcacgccgaccacgctggccgacggacgcgacttcttctatctcgacgacgatccggaatacgtctccggcgccaagacccgcgagctcaaggacccgcgcccgctggactaccgcttcgccccgcacctggacgccgacggcaacgaagtgccgtacgccgccccgcagatgcgccgcgacccgctgaccggcgactggatcccgatggccaccgcccgcatgaaccgcccgatcaccgccggccccggcgccaccgccaagggcaacccgctggccgcgcgcaagcccggcgacccgtaccaggacggcgaggtgccggacaccgactacaacgtcgtcgtgtttgagaaccgtttcccgtcgatggtgcgtgtgcccggtgtctccgaagacgtcacctacgtcgacggcaacccgctgtgggagaagaagctcgccgccggccgctgcgaggtcatctgcttcgacccgaacgaggacggcctgccggccgacctgccggtgtcccgcctgcgcacggttgttgaggcatgggccttccgtaccgccgagatctccaagatggaaggcatcgagcagatcttcccgttcgagaaccacggtgccgagatcggcgtctccctcgcccacccgcacggccaggtctactgctacccgttcatcgccccgaagatggagaaggaactccagcacaccgaggcctaccacgagaagaccggcggcaacctgctcaaggacatcatgaacgccgagctcgaagccgaggagcgcgtcgtgatgcgcaaccacagctgggtcgcctacgtgccggccgccgcccgctggccccttgaggttcatgtggctccggtgcgcgacgtgctcaccctcgaccagctcaacgaccaggagcgctgggacctcgcctcgatgtactcgcaccttctgaagcgcggcaacgcgttcttcgacaagggcgacggcaagggcatggacctgccgtacatcgccgcctggcatcaggccccgatccacgacgcgcgtcgcgagaactaccgcctgaacctgcagttcttctcgttccgccgcgccgccaacaagatcaagtacctcgccggctccgagtccggcatggccgcctggatctccgacaccaccccggagctcatcgccaagcgcttccatgagcttggacagatcgacatctccgactgacaacgttctatgggggagtctggccgaaccgggctccccctagcaatatccactgcatatatagccatcacacagaagaaagaacaccaatgactgctgttgaattcattgagccgttgtcccgcgaggatggtgtctcacgggcgacgaagctgttcgtcgatatgtatgccaccgcgcccgagggcgtgtgggccgctcccggccgcgtgaacctgatcggcgagcacaccgactacaacgcgggcctgtgcctgccgatcgcgctgccgcaccgcacgttcatcgcgctcaagccgcgcgaggacaccaaagtccgcgtcgtctccgacgtggcgcccgacaaggttgccgaggccgacctcgacggcctcaaagcccgtggcgtggacggctggtccgcctacccgaccggcgtggcctgggcccttcgcgaggccggtttctcgcaggtcaagggcttcgacgccgcgttcgtgtcctgcgtgccgctgggatcgggcctgagctcgtccgccgccatgacctgctcgaccgcgctggccctggacgacgtgtatggtctcggctacggctcctccgacgcgggccgcgtgacgctgatcaacgccgcgatcaagtccgagaacgacatggccggcgcctccaccggcggcctcgaccagaacgcctcgatgcgttgcaccgaaggccacgcgctgctgcttgactgccgtccggagctcactccgctggagaacgtctcccagcaggccttcgacctcgacaagtacggtctggagctgctggtggtcgacacccaggcaccgcaccagctcaacgacggccagtacgcccagcgtcgcgccacctgcgaggaggccgcccgcattctcggcgtcgccaatctgcgcgtcgccgccgatggcatctccaaggccgacgaccagttccaggcgctcaaggagacgctggatgccctgcccgacgtgacgatgaagaagcgcgtgcgccacgtcgtcaccgagatcgagcgcgtgcgctccttcgtgcgtgcgttcgcccagggcgacatcgaggccgccggccgtctgttcaacgcctctcatgattcgctcgccgcggattacgaggtcaccgtgcccgagctggatgtcgcggtggatgtggcccgcaagaacggcgcctacggtgcgcgcatgaccggcggcggcttcggcggctccatcatcgcgctcgtcgacaagggtcgcagccaggaagtcgcgcagaagatcgccgacgagttcgaggctcgtggcttccatgcgccgcgcgccctgccggcggttgccgcgcccagcgccagtcgcgaggcctgattatcgcagcgaacggttctcaataagaaacgtgcgaggattcctcacaaaagcgcacatatgaacaatcggcggaagcccggaattccggacttccgccgattgttttgttcgtttcgcgcgcgatgaggctcgcacctttcttattgagaaccgttcgctgcgacaaccaaaaaagagagcggatttcgccgctcccttttttatctatctcagatcacttctcgtaatcctcgtccttgctttccttgatcaggaacagggcgatcagggcgagcaaggacatcacggcgaggtaccagccgacggactcgacggcgccggtcgacttgaccagtgcggtggagatggccggggcgaacgcaccgccgaggatggcggcgaggttgtagctcaggccggcgccggagtaacgcacgtgagtcgggaacagctcgggcaggtaggcgccgcaggggccgaacaggccgcccatcagcgcgaagccgacgcataggaacagcatcacggtcaggacgttgtgctgcagggactgcatggcgaacagactgaacaccagcgtcgcgagcgtggtggagatcagcacggtcttgcggccgagcttgtcggagtagatgcaggtcacgaagatgaagatcgcgaagaacaccacggaaaccatctgcatggccaggtattcgttctggctgaagggtggcttcatgaccttgacggcgtagctcagcgaccacgtgcccagcacgtagaacagcgagtatgtgatgcccatggcgaaggtgccgagaagcacttccttccagtatggcagcagcgagcgcagcgggtgcttcaccacgcggtcctgctcgactgccttgcggaagatcggggtctcggtcatgcgcagacgcacgtacaggccgatgatgacgagcactgcggagcacaggaacgggatacgccagccccaggcctgcatggccgtggatccgagcgtggagtcgagcagcaggttcaggccgtaggcgcagaagaagccgatcggggcgccgaggttcgggaaggagccgtacagggcgcgcttgttggccggggcgttctcggtagcgaccagcgcggcaccggaccattcgccggcgagacccacgccctggcaggcgcggcagatgcacaggatgacgatggacaaggcgcccagctgctcatagcctggcagcaggccgacgacgaacgtggagatacccatcgtcatcagggcgacgaccagcgtggtcttgcggccgatcttgtcgccgaagtggccgaacagcatggagccgaacgggcgggcgaggaacgagacggcgaacgtcaggaacgcgtacatcgtgcccagcgccggattggccttcgacgcggccgggaagaaaatagtgccgaaatagctggcggctgcgatggaatagcagtagttgtcgtagaactcgatggcggtgccgaccatggaggcggcgatgatctcgggaaccgagtccttcttcaccgcaccggccttggacacggccgcggtagcagtagcagacatgaaagtctaacccctctaattcattcaatctctgatacgagccgacgccgcgaacgattgtgcggtgcgtggtcgatatgctcgcgggtagcggggtgcgtgggcgtcgtcgcccgagcttgtggccccagcgatgcgctcacacaccgctgtgcttgatgtaaaggtgtagtcgacttatgaaagcgatggtaatactgctcacattgtggacgattgtccgtttgcgcctggatgatccccgcgtgaacaatgccgacgtcggattcggccgatggcctgcggacacgcccaaatggacggttcggcagtatttcacgcccgctccatatacttgacactacttgcagtaatcggtttcgagcgggggagtcccatgaacaaggcaatcatcaccgtcgtcggccaggacacggtcggcatcatcgcgcgcgtgtgcacgtacctgtccgatcacaaggtcaacgtgctggatatctcacagaccatcatcgacggcttcttcaacatgatgatgatcgtcgactactccggcgcggacaacgagttcggcgtgatcgtcgaggacctggacaagctcggcgagcagatcggcgtgcgcatccgctgccagcgcgaggagatcttcacgaagatgcaccgcgtctgagtctcgaaaggaacgaatcatgctgaatatcatggaggtccgtgagaccaaccagatgatcgagcaggagaagcttgacgtgcgcaccatcacgatgggcatctcgctgcttgactgcgcggcggacagcgtcgacaaggtgtgcgacagcatctacgacaagatcactacctacgccaaggacctggtcgccaccggcgaggcgatcgagcgggactacggcatcccgatcgtcaacaagcgcatcaccgtcaccccgatctcgctggtcggcgcgagctcatgcaagagcgaggacgatttcgtcaagatcgcgcacgcgctcgatcgtgccgccaagaaagtcggcgtcgacctgatcggcggctattccgcactggtgtcgaagtccatgacccccgccgaggagctgctgatccgctcgctgcccaaggcgctgagcgagaccgacatcgtctgctcgtccgtcaatgtcggctccaccaagaccggcatcgacatgaacgccgtcgaactgctcggccacatcatcaaggacatcgccgcgcgcaccgccgacaacgactcctacggatgcgtcaagttcgtcgccttctgcaacgtgcccgacgacaacccgttcatggcgggcggtttccacggcgtgaccgaaggcgatgcggtcatcaacgtcggcgtgtctggccccggcgtggtgtctcgcgcgctcgacgcggcggtcggccgtgatttcgagttcctgtgcgagacaatcaagcgcaccgcgttcaagatcacgcgcgtcggccagctcgtggcgcaggaggcctcgcgccgcctcggcatcccgttcggcatcatcgacctgtcgttggctccgacgcccgcggtcggcgattcggtcggcgaagtgctggagaagatcggcctggagcaggtcggcgctcccggcaccacggcggcgttggcaatgctcaacgaccaggtcaagaagggcggcatcatggcgtcgagctacgtcggcggtctgtccggcgcgttcatccccgtctccgaggacaagaacatgatcgacgcggcggcatccggctgcctgacgctggagaagctggaggccatgacctgcgtgtgctcggtcggccttgacatgatcgccatccccggcgacaccagcgccgccacgatctccggcatgatcgccgacgaggccgccatcggcatggtaaaccagaagaccaccgccgtgcgcgtgatccccgtggcgggcaagggcgttggcgagatggccaacttcggcggtctgatgggctacgctccgatcatgccggtgaaccagacgagctgcgaggcgttcgtgacccgcggccgccgtatcccggccccgatccacagcttcaagaactgacgggctgcgcggcgctcctcggtgagccggtgtcgcagcgatatcgctgagctgatagtgccgatatctcaagcggccgtttccgcatgtgcgcgggaacggccgctttcattattatccccatccaagccgcctgacgttttcttcccctccccgtcaccgattccagcagtggagtactgatgaatatcggcggggaatttgctgggcatcaggttactgtgcatacacttgcagcgtaggggaatagagaaaaacgacgttgaatttatgacgtcggcagaaggcgcatgacatgcatcagacacaagcatcatccgatttggcctcatccggcatagggcatccgtcccgttctccgctgccgtgccgtccgtgtcgccgtgtcgcctgcgccgtctgctgacgggtagtgtggttccgttgctggccgtcggttgtgcgtacctactgattcccgcgttcggccacgcgatttggtatgacgagagctattcggtggcgctcacctcgcacgggtggagcggcatatggaatctgggctcgcttgacgtgcatccgatcggctactacatgctgctcaatctggtgcggctcgtgttcggcgaacatgtggtggcgtaccgtctgatgtcggcggcggcatcatgtgcactggtcgtcgccggatacgcgatgagcgctgggactggggagcgcgcgccgcacggctgttcgcggcgttggcgtgcttcgccccgccgttcatgcgcatggcgttccagattcgcatgtactcatgggcggtgctggccgtcgcgatgtgcttcctgttcgcgatgcgcatctgcatcaaggcgcgcggcagtgggcccgtgcgcgtgaacgagtggatcggattcgcgctgttctccctcgccggcgcgtacctgcattactatgcggtgctcgtcgtgaccatcatcaatgcgatcgtgctcgccgtcgtatgcgcacgcgccgtggatcgcgcagatgctgtcgcaggtgcgcagtgtgtcgtcggggtattggattcatttcgagttcccaatgacgttgatccggctgatcgattatccgctgatgggcgagggtgcgcggaacatctatgatccggcgacgatatgcctgccgactatatcgtgaaggccgtcggcgggaacgtgcaccgcaatgccgtcatcgtctcagacagtccccgcatacttggcgtgctcgccgcatccgggcgccgggatattccgctgcgctacgcgttgtggactgaagacgcatggtgggatcagcgggctttgccggcgtatctggaccgggttcgcgtctgccacagctgggatatggccgtgcagtctgataccaggcaagtcgttgtgattcgctcgttgccggccggccctgcgggagaggccagaccgggcaatggcgaggtcaaattgggtggattcatgagaggcctttccggccgcaagagcctgcgcaaacatcgtgtgttcgtgcggccgtatgaccaagacgtgggccgtgtgggtcttcgacgtgcgtcggtagatgttgttgttgcgccgtcttgccgactttgccctgtgccaggcgcggttctgacatggtcgtgggctcggctggggttcgcagatggccgggcgtgatttatggagcggtctcgtcctcgattgtgtgccacaccagggcgaaaatgggtgttttgagcctagtgtggcacaatttgtgccacagaatgagatgtaagcgcttagaatccatgtcgtggcagttggctgtttcgcgatattgttggaaaatggccgaaaccgtatgccgtagataattgatgccgaaatcgcctgtgccataccaaggcaaaaatgggtgtttttgccctggtatggcacgcaatccgcgacttgtctcatggatcgagacaagatatatcggatattgattcaagcggtgagtggaatggttgcgctgtttaaaccacgcctccgagggcttcatgccgaccgggaaatgcatcgtgacgtggaaatcgtcatggattgcgaggtataaggggctacacatacgctaacaacgcgtcactgtgcgtgggcagcgtcactgtgcgtgtgcccacgcacagtgacgtaccggcaaacccttgatattgcaatgtttttcaggaatcgtcactgagtgtgcgtccacgcacagtgacgacttccacgcacagtgacgcacttcgtgctcgcgcactgccggcaattgtgattttgcctcgcgaggctcatggtttcctcgctcgtccctgtcgggacttgctcggcgtcgctactcggaagcccactgggcttcctccctacgctccgcccttgaaccctagttggcgccaggcttcgtagatggcgatggaggcgcagttggtgaggttcaggctgcgcaggctcgggcgcatcggcagccgcacctgctcggccacgtgcgggccggccatgatgtccatcgggtcgggaatgtcgcccggctccggcccgaacagcagaatgtcggtcggcttgtactcgacctcggtatacagtttcgtcgcatgcgcggtgaacgcgatgatgcgcgaattcggcatcgactcgaccagattgtcgaagttcggatgcaacaccacgtgagccatgtcatgatagtcaagcccggcacgacgcagcttggtatcgcgaagattgaaccccagcggctccaccagatgcaggatggtgccggtcaccgcacacaggcgaatcgccgacccggtattgccggggatgcgcggactgtaatagcacagatgcggcgtgaccgtctccgtcgcggcagccttctcggccgacagcatcgcgtccacaacgctgatcggattgccgtgcgcgtcggtcaccagctcgtcgggaccataattcgacttgcggtagccgtactcgaacatcttctcgaccttcgcctcggcctcttccgcacccttggtttcgctcatcatcccgccttgtctctgccggttgtcttcgaccttcgagcttaaaacagcccatacccgtaacagctgctcgaaggagagaccatgagacaattattccgccgtatcacgaccatatccgccacatgcgcgttggccgtttcggttgcagccgcagtcgcggtggccgccgaacccaccacaggcaacatacttaccggtaaaccgcccacgaccagcagcgcgcatctgatcggcgacggcgacaccggattcggcccgaccgacagcaacatcactaaaatcatcgccggagaagagaacggcagcgcggaaaacaacggatacgccagctgggacgacgtatacctgcaatatgatttcggcgagccgagagagatacactccatcaacctgtaccgcaatgggtatgagaacgcgctgaacacgttcaagcgcatcaaggtcgaagtgtcctccaacgaggacttctccgacacgaacgtgctgttcggcaccgccgacgtcgaggaaaccgccgcgaccaagctcgccgcgcagaccatcaacctgaccacgcccgtcaccgcgcggtacgtgcgcatctggcagaagggccattgcatccagaacacgaactcctcatggaagggatacagcaacggcgtgggcttgcgcgaaatcgaggtcatcgacaagctcaaggacggcgagaccctgccggacgcgcaggagacgcgcaacatcgcgctcggcaagttgccgtatgtgtacggcctcgacccgaccaacatcgcggcgatcagcgacggcaagcaggacgacaactacgccgtgcacaacagcaccggcgagcggtggctgcagttcgaatacaagaaccgctaccgcatccacgaggtctcaagccgggcacctatccgctggtccgcataggcgtgtcgtcgacgcccacgtcggccggcaaggacgtcgacggcatgcattcgcgaccgatgttcccgattctggagacgcaggtcggcgacggctgggtcggcgacatcgactacacgaagcaggccacgaagcaggacagcaatttcctcgtcgactgggtgcgcgtgtaccaatccgaggggcagccggtgacgcgtttcgacgacctggacggcgccgagagcggcgcgtaccggatcgcccccgcctcacggaccgaggggctgaccgcagtgagcaacggcgacgccgcctggcagaacaagaacaacttctactacggcggacagccgcggtatgagatcagccgttcccatgccgtgcccctgatgcagggccgattcgccctgcgcttgcgggggccacaaacactctgccgaatccggacgaatgcttttacccgcagcgagcgacccgttgcaggtaaggttgtgccaccgaatcggcgaaatcgcgcggcgccgtgatgatgtagcggtcgccgtgcacaatggagcgatgccagagatacggaacgatacgccggccgaacctgtgggcgagtgcgctgtgcctcgcgtgcgggcgctgctgtccgcatggtgggaggccaacgcccgcgacctgccgtggcgattcgggcgcgcgacgccttggggcgtgctggtgagcgaggtgatgagccagcagacccagatgagtcgggtggtgccatactggactgactggatgcgcatgtggccggacgtcaccgcgctcgcgggggcctccacggcggaggtcatcaccgcgtgggggcggctcggctacccgcgccgggcgttgcggctgcaggagtgcgcccgcgtggtgttcgagcaataccacggccggcttccgcaaacctacgacgagctgaccgcgttgccgggcatcggcgactacaccgcctcggcggtgctgagcttcgccttcggcgtgcgcatcgcggtggtggacaccaacatccgccgggtgctgtcgcgcgtattcctcggagtcgaatcgcgcgggggagcggccagtccggccgagcgggcgctcgccggcagggtccttccgcaggatgatgagacggacgttcgtgatgccatcgaagccgcgaatgcccgcgagacggtgaacgcccccgaatccgcaatccgcgagatgacgcagcgcagcacccgcccgtcggtcatatggaaccagtccgtgatggagctcggcgcgctggtgtgcacggccaagaacccgctgtgtgaccagtgcccgatcggtgagcattgcgcgttcctcgcggcgggccaccccgggctgggagagcgacgcacccgcccgcgccagcgtttccaaggcaccgaccgtcaggtgcgcggcatcatcctcgacgcgctgcgcgctgagccaatcctcgcccgcgaacgcctggaatccctgtggccggatcacgtccagctcgacaaatgcatcgcctccctcgacgacgatggcctggtcgacatgctcccggatggttcgttgcggttaccccaataagtgcgctctcaaaactcgcagatagagggggtttatccccgaaaacccctctatctgcgagttttgagagcgtgcctgaggtagactggacggcatgcccactcagcccacccgtcagccgcgacccggttcgcggcaaaagccgcgcaagcgcgtcgtcagcccgcaacgacgggcgatgtaccgtcgtcgccgtgcggtcgcgctggtcgttgtgctggccgcggtctcgctggtggtgttctgcgtgtacagtctcggccgcggcgtggtggatggcatgagcctgctgcgtcccacaccgatcgcgcgtgaatcggtgccggcgccgaagaagaccagcggcgtcaatgattgtggcgcgtccgatgtgaagctgtcgctgacggcggcttcccaaggcgttccggtgggaggttccctggacttcacggcgagcatcagctatgaaggcacgtcgagctgcctgctggatctgtcggatgtggtgctgacggtgtcgtccggcgaccagacgatatacagttcggactcctgccccgctgacccgaaccgtcagctgctggcgaagaccagcgacatgaacaggacgtcgcagaagatgacatggggcacctcccgcacgggggatcagtgcgtggaggatcagagcaaactgccgaaggtgggccgtggcacatataccgcgcagttgagtctgaagaacgcgcacaaggcggtcagcgatccggtcaccatccaggtgcagtgacggtcaggtgcggtgacggccttgagcgggccgctcgccgcgggctcggcggttgccgcgtccggccgcagcgtgcggcgtgtcgcgcatgtgatgtatgttgcgccgacggctgatttgtgctaaaatttggaatttgcgtaagtgcatgtcatatagcgggcatgtcgacaaagatgaaacgcccgcgattcggcatatggtggccatctgcggcgtttccgggaacatatcgataacgacattagcgagcgataaggaacgtccattggctgacactcaagctacgacgaataccaccaccatcatcgcacgcgccgaccagcatgacattgatctgcacaaggcgtcggaccgtgtgaatttcggctccatccgcgagcccatccccgtgccctacctgctgggcgtgcagaccgacagcttcgactggctgatcggcaacgagcgttggaagaagcgcgtcgaggaggacgaggcgaacggcaccgacaccgttccccacatgtccggccttgacgaggtcttcaacgagatctccccgatcgagaacttcgcgcagaccatgagcctgacgttctccgagccgtacttcgaggagccccgccacaccgtgcaggagtgcaaggagaaggattacacctactcggcgccgctgtacgtcaacgccgaattcgagaacggcgacaccggcgagatcaagtcccagaccgtgttcatgggcgacttcccgctgcagaccccgcacggcaccttcatcatcggcggcaccgagcgagtgatcgtctcccagctcgtgcgctccccgggcgtctacttcgaccgcagccgggaccgcgccaccggcaaggagatcttcggcgcgaagatcatcccgagccgtggcgcatggctggagttcgagatcgacaagcgcgacgtgctcggcgtgcgtgtcgaccgcaagcgcaagcagtccgcgatcgtcttcctgatggccatcggcatgaccaagcccgagatccgcgatgcgttcgaaggctactcgctcgtgctcgacgcgctggagaaggagaccatcgagacgcaggacgaggccctgaccgacctgtaccgcaagatccgcccgtccgacaccgccaccccggaggccggacgcaacctgctcgactccttctacttcaacaccaagcgctacgacctggcccgcgtcggccgctacaagatcgaccgcaagcttggcctggagcacgagatcaacgaccgctccctgagccgcgacgacatcatcgccaccctgaagtacctggtcaccctgcacgacggcggcaagaccttcccgggcaagcgcaacggcgaggatgtcgacctgcacgtggacgtggacgatatcgatcacttcggaaaccgtcgtatccgccaggtcggcgagctgatccagaaccagctgcgcaccggcctgagccgtatggagcgcgtcgtgcgcgagcgcatgaccacgcaggacgccgaggccatcaccccgcagtccctgatcaacatccgccccgtgaatgcgaccatcaaggagttcttcggaacctcccagctgtcccagttcatggaccagaacaacccgctggccggcgtgaccaacaagcgccgtctgtccgccctgggccccggcggcctgtcgcgcgaccgcgcatcgatggaagtgcgagacgtgcacgcctcccacttcggccgtatgtgcccgatcgagtcccctgaaggcccgaacatcggtctgatcggctcgctggcgacgttcggccgcgtgaacccgttcggtttcatcgaaacgccgtaccgcaaggtcgtcgacggccagatcaccgatgaagtggtgcacatgaccgctgatcaggaagtcggccacgtcatcgcccaggtgaaccaggagatcgacgagaacggtcggttcgtcaacagccaggcccttgcccgtaaggacgaggaagaggcggtcgatgtcccggtcagcgaagtcgacctgatggacgtgtcgccgcgtcagatggtctcgatcggctcctccctgatcccgttcctggagcacgacgagggccaccgagcgctgatgggtaccaacatgcagcgtcaggccgtgccgctgatcgagtccgagcgcccgctggtgggcaccggctccgaatggcgcgttgcctacgattccggtgacgtcatcatcgccgacaagccgggcgtggtcacctacgtgtccgccgacatcatccgcgtgatgaacgacgacggcaccaccagctcctacaagctgtccaagttccagcgttccaaccagaccacctgctacaaccagcgcccgatcatcaaggacggcgagcgcgtcgaggccggcaccgtgctggctgacggccccgccatccagaagggcgacctggccctcggcaagaacctgctcatcgcgttcatgccgtggaacggctacaactacgaggacgccgtgatcatctcgcagcgcctcgtgcaggacgacaccctgagctccatccacatcgaggagtacgagatcgatgcccgcgagaccaagctgggcgccgaggagatcacccgcgatctgccgaacgtcggcgaggacgcggtggctaacctcgacgagcgaggcatcatccgcatcggcgccgaggtcgaggccggcgacatcctcgtcggcaaggtcactccgaagggcgagaccgagctgaccccggaggagcgcctgctgcgcgccatcttcggagagaagtcccgcgaggtgcgcgacacgtcgctgcgcgtgccccacggcgagaccggtactgtcatcgcggtcaaggagatcacccgcgaggacgccgaggaggacggcgacgagctgcccaacggcgtcaaccagatgatccgcgtgtacatcgcgcaacaccgcaagatcaccgtgggcgacaagctgtccggccgccacggcaacaagggctgcatctcgcgcatcctgcccgaggaggacatgccgttcctggcggacggcaccccggtcgacatcatgctcaacccgctgggcgtgccttcgcgaatgaacctcggccaggtgctggaactgcacctcggctggatcgcgcactccggctgggacatcagcctcgaccccgatctggaggccgagtggaagaagtacgtgcccaagggcgccgaaaagggcgctccgaacacgccggtcgccacgcccgtcttcgacggcgtgcgccccgacgtcatcaagggcctgctcaagtccaccctgccgaaccgcgacggcgaccagatggtcggcgaggacggcaaggcgcgcctgttcgacggccgcaccggcgaaccgttcccgaagccgatctccgtgggctacatgtacatgctgaagctgcaccacttggtcgacgacaagatccacgcccgttccaccggcccgtactcgatgatcacccagcagccgctgggcggtaaggctcagttcggtggccagcgcttcggcgagatggaggtgtgggcccttgaggcctacggtgccgcctacacgctgcacgagatgatgaccaccaagtccgacgacgtggacggccgcgtgcgcgtctacggtgccatcgtcaagggcgagaacctcccgccggcaggcatccccgaatcgttcaaggtgctcctgaaggaaatgcagtccctgtccctgaacgtcgaagtgctcaacgccgaaggcgtcgccatcgacatgaaggacgaggacgacgatccctcctccagcgctgacctgggcttcaacatcggcgcacgccccgacgctgccgccaaggaagaccagaaggccccggaacccgaataccagtgattccccacgggtcgtccggcccgcggccgcgcagcgaacgcgcggcgcggcgggccggacgacccggacgaaacgtgattgaacatcaatttcaaagacaggacaatacagagtgctggacgtcaacgcatttgacaaactgaggatcggcctggccaccgccgacgacatccgcaattggagccacggcgaggtcaagaagccggaaaccattaactaccgtaccctgaagcccgagaaggacggtctgttcggcgagcagatcttcggacccacccgcgactgggagtgcgcctgcggcaagtacaagcgcgtgcgcttcaagggcatcatctgcgaacggtgcggcgtggaggtcaccaagtcccgcgtgcgccgcgagcgcatgggccacatcgagctggccgcccccgtcacccacatctggttcttcaagggcgtgccgagccgtctcggctacctgctggacatcgctccgaaggacctggagaaggtcatctacttcgcggcctacatggtcacgagcgtggatgaggagcggcgccacaacgacctgcccgacctgcaggacgagttcgataccgagatcggcaacatggccaagcgccgtgacaacgagatcgagaaccgcgcccgcaaggtcgaggaggatctcgcccagcttgaggccgaaggcgagggcaggggccccgcacgcaccaagctgcgcaacggcgccgagcgcgacatggccgccatccgccagcgttacgacgatcagatccagcgtctgaacgccgtgttcgaccgcttcaagagcctgaagccgggcgacttggaaggcgacgtggacctgtggcgcgagatgcaggaccgctacggcgactacttcgagggttgtatgggtgcagaagccatccagaagcgcctgcaggacttcgacctggaggccgcctccaagcagctgcgcgaggagatcgactccggctccggccagcgcaaggcccgcgccctcaagcgcctgaaggtcgtcaacgccttcctgaccaccggcaacaagccggaggccatggtgctgaccgtcatcccggtcatcccgccggacctgcgcccgatggtgcagctcgacggtggccgcttcgcgacctccgatctcaacgacctctaccgtcgcgtgatcaaccgcaacaaccgtctgaagcgcctgatcgagctcaacgcgcccgagatcatgctgaacaacgagaagcgcatgctgcaggaagccgttgactccctgttcgacaacggccgccgcggccgtcccgtcaccggcgcctcgaaccgcccgctcaagtccctttcggacatgctcaagggcaagcagggccgcttccgtcagaacctgctgggtaagcgagtcgactactccggccgttccgtgatcgtcgtcggcccgtcgctgcgcatgcaccagtgcggtctgccgaagccgatggcgctggagctgttcaagccgttcgtcatcaagcgtctggtcgacatgaacttcgcgcagaacatgaagagcgccaagcgtctcgtcgaccgcggcgactccgaggtgtggggcgtactcgaagaggtcatatccgagcatcccgtgctgctcaaccgtgcgcctacgctgcaccgtctgggcatccaggcgttcgagccgatcctggtcgaaggcaaggccatccacctgccgccgctcgcctgcgccgcgttcaacgccgacttcgacggcgaccagatggctgtccacctcccgctgagcgccgaggcacaggccgaggcccgctcgctgatgctcgcttccgacaacatcctcaagcccgccgacggccacgtcgtttccatgcctagccaggacatgatcctcggcctgtactacctgacgaccgtcatggacggcgccaagggtcagggccgcgtgttctcctcatacgctgaggcgcagatggcgctcgacctgcacgagatcgacatgcaggccgaagtgctgatccgcctgccgaaggacttcgtgctgccgaccggctgggagccccgcgagatcaccgtcgtggatccggaaccgggcagccccgacgtcgtcaaggaagagcgcttccacgacggcagcgtgctgttcgctacctccatgggccgcatcctcttcaacgagacgctgcccgtcgactacccgttcgtcaacgagcaggccaagaagaagaagctcgccaagatcgtcgacgacatctccacccggtactccaccgcccaggtggccgcctcgctggatgcgctcaaggatctcggcttcacccgcgcaccttggtccggcgtgaccttcgcgttctccgacgtcgtcgagccgccggagcgtaacgagctggtcgcccagtccgaggaggaagtcgccaagatcaacgagcagtacgacctcggtttctacaccgaagaggaccgccgccaggcgatcatcgacgtgtggaccaagtgcggtgaggaagtctccaaggccatcgagaagaacttcgacccgaagaacaacctctcgatcatcgtcgagtccggtgcacgaggcaacatgacccagatcaaccagatttccggcgtgcgtggtctggtgaacaacccgaagggcgagatcattccgcgaccggtcgagtcgaactaccgccgcggactgtccgtgctggagtacttcatctccgagcacggcgctcgtaagggtctggccgataccgcactgcgtaccgcagagtctggctacctgacccgtcgtctggtggacgtctcgcaggacgtgattgtgcgcgaggaggactgcggcaccaagcgcggtctgaccatgcgcgtcgccgaccgcgacgagaacggcaacctgacgctcgtcaaggccgccgacggtggcccctactcccgtctgcttgcggccgacgtcatcgacccggccgacggcacgaccgtgctgtacaagcgcgacgacgccctgtcgatggacgtgctcaacgacctggtcgcgcacggcgtcgaagaggtgcaggcgcgttccgtcctgacctgcgagtccaagcgcggcgtgtgcgccaagtgctacggctggtcgctggccaccaacacgctggtggacgtcggcgaggccgttggcatcgtcgctgcccagtccatcggcgagcctggtactcagctgacgctgcgttccttccactccggtggtgtggccgccgcgtccgatatcacccagggtcttccccgtgtcaccgagcttttcgaagcccgtaccccgaagggtgaggcgccgatcgccgagttcgccggcgtggtcaaggtggagaacaccgatcacggccgtcagatcacgctgacgccggacgacacgagcgtcgaaccgatcgtctacaccgacacccgtcgcgcgccgatgctggtcaagaacggcgatcacgtggccgccggcgaccagctggtcgaaggttccgtcgatccgaagaagatcctgcgcatcctcggcccgcgtgccgcccaggtcaacatcgtgaacgaagtgcacaccgtgtatcgttcccagggtgtggatatccacgacaagcacatcgaggtcatcgtgcaccagatgctgcgccgcgtcaccgtgatcgattccggtgacaccccgctgctgcctggcgagctcgtcgaccaggcgcgcttcaaggccgccaacaaggagaccatcaagaacggtggcaagccggccgccgctcgtccggagctcatgggcatcaccaaggcctcgctggcaactgactcgtggctgtccgccgcctccttccaggagacgacgcgcgtgctcaccgaagccgccctgagccagaaggtcgatgacctcaagggcctcaaggagaacgtcatcatcggtaagctcatcccggccggtactggcctcgcccgctaccaaaacgccgtggtggagcccgacaaggccatccgcgacacgatctacccgaacttcgggctgggcgcggacatggacggctcgcagaccgacttctccgatgccgacctgtccgatgtggacttctccaacatcgacttcggtgacctgaagctcggcgacgacttcaatcctgacgatttcatcgatgatcagggcgggaacgacttcggcgccgactccggcaacgatctcgtctgagtcctagctctgtcctagctctgtgaaagcggggcccggaaccattgcggtggttccgggccccgctttgtcatatgcgaagcgcgggaatgtctgcgggagaatgcatagacgcgaaatactccgtgaaacatcccgtgaaacattctgggcgcgcatcgtcgaatcgattgcatccggtcagagtcccgtttttccgtcgttggatgggactttcgccggatggtatttcacatgatggacagtgcaatgccgctactggcgctcggtgagttggaagaactggtctccgatacgcagcgtggcgggggcgtcgagttcgcgcggcttgcccttgagcacctgcgcttcctgcccgtcgcggatgatgtaggtgccgttgagggaaccgtagtcctcgatccacagcgtgccgttctgatcgatgctgatcgcggcatgattgcgtgatgtggtacgcgtcggatcctcgaccttctcggccttggcgccttcgggcacgtccatggacggcttgcgtccgagcagcgtgctcttgtcgatgacgatggtctggccggtggcgtcgttgtgcaggatgtatatcttccgtggcgccttggcggtgaaggacgacgacagcaccgtgctgtcccagtcctcgatatcgccgtcggacgagcccttggccgcatggctggcggtggaggatgagacgggggatggttccgccgctgcggaagagactgcggcaggcttgtctaccggatcgtctgcgtaccagcccagctcgggtgccgggggatagggaatcgttgccatgtcaacggctcctttcactgacgtgtggcgagggcggcgttgaccgcggggtcgttcagctgggcgagccagtcgaccagtgccgggtaggtgctggggttacgcgcgatgcaggggcgcaattccggcgcgtactgcgcgatcttggcgatgagctcctgatctgtggtctccagcgccatctgagccgtgtacccgtatggattggtggcttggggctcctgctgcgccgcgtactgcgccgccgcgtactggtcctgtgccggctgctgctgcgcggccgatgccgcatacgaatctgcggaatattggtccgcgctgtacgaatctgcggaatactggtccgcagcggcggagtcagcggcggagtcggcggcgacatcctgcgccggctgcgcgtcggccacggggccgtcctcggcggtgacgcccatctgcgcaagcgtctgccgcgcacgctcatcgccgaacgttgccagccaacgcttcaatcccggatagcagcgcgggttcactgccacattggcgccgaattccgggttttcataggcgattttcgccagcaagaccggatcggcattgggatcctgcactgttgcgacggccttgtcataatcaaccatcgtgacctctttccttgatgttcagatttggttggccggtttctggatgcgtatggtgtcaagcgtctcgtcactgaccgtttcgagatcctcctgctgcgcgagcctactggcatgccacaccttctgcccagcatactcgcccgttatgtccagaacaattacggtgacattatccgtaccgcccgcttccagagcgatgcggatcagttcgtcgacggcggtctgcgggtccgcgcatgccgcagcagtggcggcgatggcggcgtcatcgacttcgccgtgcaggccgtccgagcagatgatgaacctgccggtcggtcggaccgcgaagaagtccgggttgatgccgtccgggtcgccgatgcactgggtgatgatgttgcgcgggatgatggcggcatcttccggcagcatctcaccggagtcgatggcctcctgacggcgggagtggtcgcgcgtgatgcgacacagcgtggaggcgtcccactggccgtcgctgtcggcatccatgtgatatgtgcgcgagtcgccgatattgatgacgtaccagtccatgtcggggttgatttcgagcgccacatcgccgggcgcgtcccgttcgattcgccctggcgcgatcagtccggtcaccgtggtgccggacacgccgccgagctcctggccgatggcgagcacgtcggcctgggcgaggtcgatcgtatgcccgatggtcgtgcggctccggctgaaacgtgacgccagtgtctcgaaacgattcaccgcggcgctgctggcccgttgcccgccgacgccgccgcccatgccgtcacagacgaggaacacgccgtcgtcgatgatgaacgaatcctgattggcgcgtcgcctcaggccgatgttgctgtccgctgccacgtgaatttgcatgtcgttcatgactgtcggcctttctgtgaggagggttgctgtgcggatggttgttgcgtggcgggcttctggccagcgggctgttgcgtggaggatttccgcttgacgggccgctgtttggcgggttgccgtccgtctggcttcctcttgtctccgtgccgccatgtacgaatacctgacagtatacgaacgttatggaaaactccgcgcaatgacaggcgggttcgcagcctgcgcatgaaggactgcgaggcgagcatgagcttgcgggtcgtcagtacggaacgccagtaggcgcctgcctgttcgggcgtgaccggctggccggagaacgccgcgtaatcggcttgtcgtcccagcgcaatcagtggggcaccgtcgatgttgagctgccgtgcgatggcctgcgcctggttgcggcgcgtgccggtgacgggtatgccgctctgcccggcgagcgcgtgcacggcctgccagccggaggtgatgcgctgccgcgcgtcgccgtgccggcgcaggcgggccagggcgacggtcttgagtgcgaggatcagcagacagatcagcagcggtatccataccgggctgccgtagatggcgactttcgccgcgatgcgtccgatggtgctccagatggatgccgccggctcatcggtggcatcctcgccggccagcgccgatttgccgtgtgcctgctcctcgtcgcgcagcgggtcggtgagcggcacgggaggctgtcggaccagcgtctgcgggttgggtggggtgaggttctggttgtcgtcgggtatcttcgtctctttaggcgtcggatagaacgcgacccagccgtatccttcgagattgatctccacccatgcttcgatgtcgttgccggtgaatttgacggtcgaggtgccgttgaccgtttcggtgcggtcgttgctgatgtcgccgtcgtcgttcttgggcaggaagcccatgaccacgcgggatggcaggccgagttcgcgggccatcagcgccatggcggaggcatactgctcgctgtcgccgaccatcgcggatccagcgagcagcgcgttgatgcgatagctgccatgtccgggcagcgacggatagtcgccggtcaggccgtgcgagaaccaaccagaatccttgagctgcgcgaccagcgcctgcgcctgcgcgccggccgtgtcctcgccgcccgccaccgacgaggcgaacttgcccaccgagtcaggcacgtccttggtgcccggctggtcggtgaccgccgcgttggccttggcgatctccttgtcggtgggtgtgggggcgatgatgccgctttccgtataggtcatgccggtggacagcccggccgggatgatggccgactgcgtgctctcgttgtagtagaagagcgtgtggtcggcggaggatcgggattcgccgccgccgtttccgttggcgcctccggtctttcccgctgacgtgacatcgacgctgctcgccgctcctgccagcggcagccatttgtcgctcagacccttgtcgatggtgaacgtggcggtgaacttcttgccgtccaccgtattggggatgcgggtgccgacgcgtcggtagtcggatgagtccgaggcttcggtggagtcggacaggttccacacgttgccgtcgaactggtccatcaccgcgaacctgaccggcgtgccctcgggcagattcgtgaccgtgagcagcgtgtcatccttgtggtccttgacgtaggagcgcaggccgctgagcgggcttgcgtaatcgtacgggctgagcggcggatcgtagtagtcgcgcaggatcagacgtgactgcccgatgcccatgcatgcgcccacgcccaggccggccgccagcagcaggatgatcgtggcgctgatccagcgtcccagttccagaagttgccatcgccatgacagccagacgatcatgatgaggccgatgagaacgccggaggctatgggctggaaaccggtctgcgtgcccaacagggcgcagaccaccagttcgatggcgatcggcagcaggctcagcacgctgagctgccgtttgtcgccgatggcgaacacgccggcgaggaatgacagccataggcatatcgtccatgccgccatcaggctgccatcgccggaaccggtcggcggcggtacggcgataaggtatttgaacgcgccgaaggtgctgacgaacccctgtgacagcgtttccacagagggaatcacatggctgatggcggtgtcgttcagcgcgatgaccgggccgatgacgccctgcgcaacgatcaggaacacgatctgccaccacaggcgcagcgcgggtgcggtccctgcataggcgatgagggcgccgagcagggtggccggtacagcggcgacggcccacatggcggctgatccgtacacgtcgagaagattggatgcggcaatcagcgacgtcagcgcgatgacggtcacgctgatgaggttcgtgccccaggagcggcgtccgacgcgggcgagcggcagacggttgccgccgcgtgtcagccagatcactgaatgggtggattccgcccatgagccggtggtggtgcccgtgccggtcacggtcgagccgagaccggagaacggacgcctggtctgcccaacctggccgggcagggcgtccacggccgacgtggcggagtccgagccgagtgagctgtcgatcacatcgttcatgcgagcacctccatgatgagcggcaggtcgtcaagcgagccgacggtggccagcgtgaagtccgtgaaatgcttgattgcgcgcacgccgcccggcgaggtctgcagcacgaggcacgtggcggatttcggcagcgcgagcaccatgcgcttgatatggtcgagctgcttgagcgagccgacggtgaagaagtagaacgagctgtcgggcgagtgtcgcagcgtgctctccaccagattcgggttgtcgtcggtccgcggggtgatggcgctgcaatcgtccaggaaccccatcgggaatttcggcgtgtcatgcgcgctgccggcatgcgtctgcagcggacggtcctgtttgaggcactgcacgcccagcgaggcgtgcacgctcacggccatctcgaactcctcttgactgacgtaatcctgcggggtcacgtcgagcgtcatactcgtgtcggtccgccgcgtcgcctcgtactggcggatcatcagcgtgccggtcttcgccgagctgagccagtgcacgttgcgcacgtcgtcgcccggctcgtattcgcgcagcccgtagaagtcgaggtcgtcgtcgacgatctgaccgctgggctggccttccagatcccgtgcgacgccagcgttgagcgtgttgagccgcacgatgttcggatggatatagacggtgatgcgttcggccagcgccttctcgtggcgcaccagcccgaacgggtctcccttgcggatgttcaacggtccgacggtcaggacggcgcgggagacggtggtgaactcgatatcggtctgcttggactggcccggcgccagcatggggatgccgaaccgctcgtgagcctcgcccaacggcaggtcgccgcgtgcggtcgtggtgggggtgcgcccgggattgtcgatgtccacggtcacatggacgtcgtcgccgacggtgacgcggcggcgcgacacagcgatggacgccttgaacccggtattgccaagcgagagcacgatggcgcagaggatcatcatcagcgccaccgcggcgatggcgagcagctcatgccagcgaaccaacgggaatccggccgcgcatacgatgccgatgacgaccacggtccagcccagtggagatatgaacgaggtgaagaatcgcctgaccgcgcgcttgcagcggcgccacaggcgtgccgagctaagccgtcgcctgtgacgcgccgacttgcccgatgcctgttggtctcgctcgttccgtggtttcggcttgcgcggtttccgcggcttctgcggccttgcttcggatgatgaactgtcgttgtgcctgcgcatggaacgcctttcacgcgccgagcgacggcgccggcacggtctccagcatccggctgatggcctcgtccgtcgtcagaccggcgaaggtggcttcggcggtgagcttgatgcggtgcgacagcacggcgaccgccagatccttgacatcgtccggcaccacgtatccgcgcccgtcggaggccgcccagatgcgcgcgcagcgggtcagcgccaacgcgcctcgcatggacgagccgatggcgatgttctcgtcatgacgggtcgcctcgacgatgcgcacgatgtattcgaggatgttgtcgtcgatgtggatgcgctctccgatgccgcgcagcgcgaggatgtcatcgccggcgagcacgggggagacggtctgcgcgcggtcgcggatgttgacctgccgcaggagatcgacgcttacctgatgaccggggtacccgaccgacgtcttgatgaggaaacggtccatctgggcttcgggcagcttgtatgtgccgagctgttcgatcgggttctgcgtggcgatcacgatgaacggctgcggcacgtcgtgcgtgacgccgtccacggtgactttctgttcctccatgacctccagcagtgcggactgggttttcggcgaggctcggttgatctcgtcggcgagcacgatggacgcgaataccgggccctcgcggaactcgaactcgccgtgcttctggtcgtagaaggtgatgccgaccacgtcggacggcagcaggtcgggcgtgaactggatgcgcttgaacgacgcgctgatcgagctcgcgatgcctcgtgccagctgagtcttgccggtgcctgggttgtcttcgagcaggacatggccaccgacgagcagggcggtcaggcatagacggatcggatgtgccttgccgaccacgacggtggagacgttcgcgagcagcgcgtcgaacgcctgcttgaagtaggcgatgtcgtcggcgctggccggggtctgcgggttggtgttcgcgacggccgggttcgcggtcactgggcgcgcggctgccgccacgggagtattcgcggttctggctttgggaaaggcgacgttcggaatcttggccgcgggtgcggtggtcgggtgctgtatggagctcagctgcgtcgcatcgagatcgacgccggtcttggccgggccgttgttcgtggtgttgtcgccggtgtcactgacgggcgagacggcctcgccgttcgtcttgttctgcaccggggactgcgccgacttgttctgtacactcttggcttgtgacggcttggcttgtgccgactttttgcctcggattgccttgccggcagcagcacctccgcggcgcttcggcaacgtaggaatggccacggtcggtgcccccttcgacttgtcggcctcaccaaccgcggcaccgcccctggcatgcggtgtctcggaaatcacggtgccgtcggacaacaccgtctcatcggagacctcagtcccatcgccgctcgctgatgagacggactgcgctactgtgctcttttccgcgttgccttccgcggtgtcgtttttctcggctgcgttttccccggcactgtttttcactgtgctcggtgcggctgcattcgtcgtggcctcggcggactgagccgtgttgccggacgacaggacggtcttgtccgacaacaccgtcctgtcggacagttgcgtggcgtcgtcgagttcgttgctctcgctcatcgtgatactccttgatgtgtgtggtggacggtgttgtcgtatcggttgatggatggttgataaatcatggtcggtttgaggccagtgtgctgatggatggcatggaaccgaacgaccggcgtcggatgcggctcgggtctacgccttccgtgaccattccggatccctcggccggtttgcgcattccttggacttccctgatgtcgtcggcggtgttcagcgcggagtcggcaccggtcacgctgatgtaccaatacagcttttccgtgtcgatcctgaacgatgagatatcgatgtacccctgcttcgaagctgtgctccatgtgacgttccaatcactttcaccggtcggcttgccgctggtagtggagaacgcgacaaggaccgttgccggctggccgtagaggttcacgctgccgccggacaccgtgatgcggttacggtctgtcgtgctccacgccagcgtaggcggttcgatcttcgctggggtcttgtatacaaggcccttaccgtcaaatatgatggcttcgctggagtgccccttgaacgactgcgtagctgatacagtgccgcaggtttcccacgggttgatgcggtaagttgcggcggctgaatcgccgttgcctctgtactcctgaccgttggcgaaaatggagagtccgtcatgctcgccattaccgccaactgacacggagcactcgttacctttgagcgtcacctgcaggtttttcggaggctgtatcttgtactgcggcgtcaccttgttcgagtcagccgaagctggtttggcgccgctttgctgcgggttcacggtcgccttgacactgagctcctcataccactgatcgcggcttatcgtatcggtgaaggtgtgggtgccgcagggggccgacatggagattgcgccgctcagttccacgctggaacatcccgcgttgtgcatgttgccgagcgtcaacgtggccttcaatgtattgccctttattaccgataggctgaccgtcggcgcgtccgggtcgccccagggcgtcgccgcgttgctggcggcactgggctggccttcgccggcacggttctttcctttgacggtggcggtgtatgaggtgccatcgccggtggcgctgttgtcgattgggaacactagggaattgccggaggtctccttggtgacggaaccgccgcccgaaccggtcagcgtcaccgtgtagctgtccggcttcgtaccgacataatccggaacatcccacttgaccgtcacacgctggtagccggcctcggtggtgaccttcttcggtggatcgggcaccttgtcgggcatggctttgaccgaggtagacggcttcgaccagccgacctcgttcttcgccttgacggtgaacgagtattccttgccgttggtcagcccggtgatctggcaggtggtgaccgcgccgcacgacttgctgccgccgtcccaatcgacctcgtagtcggtgatcgggctgccgttggccgcgcctgcggtccacgagaggttcaccgaaccgtcagccggctgcccggagacgggggagagcagcggcgcgccgggcttgtccaccacggagacggtgatggtggcggtcacctgtcggtcgcgcgaacgggtgccgtcctgcacggtgacgagcacggtgttcgaggatgcgccgatatcggttccggcggtgatgctgatgttgccgttcgaagagcagttcacggtcagcttcgccgaatcgtcggacttgcagctgacggcggtcagcgacgaatccgggaacggattgtaggcgtcggagaacaggtccacccgttcggtcgaaccggccttgagcttcaccgtcttcgcgccgatacgggcaagcgggcggttcgactgcaccacgcgggcggtcatgccggccttgaccgtgccgcccgaatagatgatggtcacggggatgctggccagcgatcccacggtagcgtccttgggggcgctgacggtcaactggccggaggcgctgacgcgcgcggtgatgccgcccgattcgctgccgccggaatatgtgtactgcttctcatcttcgtatgtgccagcgggggagtgggtcagcgcggtcaggtcgatgatcttcgcatcctcacctgccaccacgtcgatcgtggacgacgagaaggtcggcggtggcacttcgcggccgatgaccgtgatcggcagggtcagcactgcggagttgatgatctgcgtcttgtcgttgcccttgccgtccgccgcggtgaacgtgatcgaggcgggaccgctgtaatccttcggcgcggtgaatttcagcgtcgtgtcgttcacgtagaggtcgccgccatccgatttggtggcgctgaccgattcgggggactgcacgtaagcggtcttgccggcgcccacacgcacatagtcggcgatgttgatggtgatggtctcgcgcgagttcaccttcagcggcggcgccttcggacgcagcgtcggcgggaacacgccgtatgcgggcacttggatgaacgcggtggaggtgatgccgtacgtcgtgttcgttaccgtgtacggcaccgaacgggcctcgtcggtcagatccacggagatgacggtcgacttctcgccgcccttgaccttcgcgtggtcggtggcggacgggtcgacgccgaccttcagttcgttcgcggtgccggacgggttggcgatccactgcgagacatcgacctcgacggtccgcttgtcgatggtcgcggcggatggtacgcggtagtcataggcggtgggcggctcgatggtcgcattcgggtcgacgttgaccgtcaacgtcgcggtgtcgctcaggccggccttatcggcgaccgtgtgcatgatgtagaacgttcccgcctggtcgggcgtggtgaacgagatcatgttgtccttcacgctcgccccggagataccctgtgactccagtttcttcgaaacggtcagatcggtgttgtccccggaaatgtcgttgagcgtcaccggcaccgtggccgccgtgtgcgggcgcagcgtgatctcgtcgtcccgcgcgtacacgccggagtcggacgcgccttggaacacgcccaccctgacctgtgcctgtgcgcgctggccggtccaatcctccaccgcgtaggagaacgtgtcggtgcctgacgagtcctcgtacgcctcgtagatcatgtagttcgcgccgacctcggtgatgcgtcccagttgcggggccttgttgcccaggccgagcagctggtcgtcgtcgccgtccacgtcgatgccggtcagtgtaattggtatgcgcactttctgacccgcggccacctgcgcctcgacgtcctgcggagtgggggcggccttgttcttggcgtccttctgatgcacggtgatggtgattgtgccggaggccgagttgccgagattgtccttgacggtgtaggtcaccgggaacacgcccgtctgtttggaagcctgataacgcacggtgtcgccggaaacgaacaccagtcccttgaacgtgtccttgtcgtactgcagcttctgctgcagcgtcaccgtggtgccgtcggaatgcgagacatggtcgagcacgttcaccgacacgatgccgtcggtgcgcacctgcgtgttgacgttcgacgccttgggcgcggagttgccggcggtcagtgccggcggctgcagcactatcgtgccggtggatgagccggccgcgttggcgacggtgtacgtgatctccacgggcttggtcggcacctgccgtgcggtcagatacacgcgcttgtggctcaccaggccggtcttgatgcccagcgacgggtcggcatcgaccgacgtgaccgacagcacgccgcccatcggatccacgtcgttggcgagcggttcgacgatggcggtgttgttcgaaccgagcagcgccacatcgttggccgcgactggcttggcggatttgcccgcggccggctgcacctcaagacgtgcgaggccggtggacgggatggagccttgggtgacggtgtaaggcacgtaatacgtgcccgtggcggtggccttgaatgtgaaggacaggtccgccgcgttcaaggtcgcgctggttttcgcgggcggttccacggtggacagctgcgcgggctgcgccgatgtgccatgcacgtacggcttgaggttgaccgtggtctcggtgttcggtgtggtctgcttgaccacggcgtcgatggtcgccggcagcgtgtttgccgggcggatggagaagtacacgagtccggtgccggtgttctgcccgtcggagacggtgacctgcacgcccactcgccccgaggtggcggaaccggtgttgaacacgagctgcccgtctgcgcgggtggagacgacgacctggtcgctgttctgcgggaccgccgacaccaatgtcatcggatcgccgtcgggatcctggaaactgccgagtgcgttcgtcgtgtacgtggcaccctgctccacgtcgtattcgggcggcgtgtcggcctgcttgggagcgtgattggcggacgagcctgtcagcgtgaccgtcaccttggccgtcgaggtctggccgcgcccgtcgctgatgtcataggtgaacgtcaccgtgccggccgaggccgccgaggcgtccagctgcaggtaccggccgtcgtacaccggcgatacggtcatatcgccgcccgccggggccccgactttggtgatctgcagcacggagcagtctgtctgctcgtcgttgcgcagcacgtcgaggatctgttgtccgcccgcgcgggcgccgatctcgtcgtcctgcgccttgatctgcccggattgcgcggaacaggtcttgttgaagttgcgctggttgttggcggactggtcgttctgcttctgctgggcggtctgctcggtctggatggtgttccactgtatcttgatgaccttggtggagtccgaagggttccacacgttgccgtcgaccacgtcgttgagtacggtcaggcggtggttggtgcggaacaccaaatccgacgtggcgctgaccgattgcagcgagccgaattccgggttgctgacgttcggcgagcatacacgcacgtaattgttcgcgctttgcgcccacgcggccgacacgcagccgtcggtggagaccggtttggctgcgtctccggcaccgccggaggtgagcgtgttgactttcttctctcccttgcccagttcgaccaggtacaggccgttcttgccggcggccgcgacccaggactcctgacggccgtccgtgtcggggtattgcagcgtcaacgggctgttggcgccggtgtcggcgctgcccttgtgccagtacagtctgccctcggatgtgacgaccgcggtgccgtccaccacggtgaaatcgtcggcggatacggtcttcccttcggtgagggagccaccctgcacggccttgcctgtcggatcctgcatcgtgagcacggtaccgtcggagggccggtatccgtacacggtgccgtcatgggtgaccgcgatcttgcctccggtgcccagccgcatggacgggtcgctggtggcggggttgacggagttgaggtcggagctgcggccgacccacacgttgccgtttttcgtgttcaggaaggcgatggtgccgccgccggtcaccgcggtcgtgtctcccttggtctccgtcctgccggtggtacccagcgtggcggaggagatgccggtggccttcgcgccttcggtgagcaccgtgtcgctgtcgtgctggacgatgtcgaaacgggctgcagacgaggccaccgccgaatccggttccttgagcttgacgttgaagcgggccgccttgcggttcttgagcgaggtgacccaaacggtgccgtcgtcgagatgcacgtgttggcgggtgatggagctcacccagatggcgccggcgatgatgccgatcagcatgacgagcgcgatgacgggcatcgcccaacggtgcgcgtcaggcgagaccaggcggcgcatggaggagcggaacgcccgctcgcgttggcgctggttaggctgcttgctcatggcatcctcttctctctcgttcgctcgcttctcgtgcaatgccgtgccgcatggtgcagtccttcatatagtgcgttcctattgcctcaccgcgcatgcgatggccggattctgggacatctgcttgtcactgcgcacgatcttcacttcgatgcaggtctgtttgtcggtcacgtcatgcagctcgactttgcggtcggccacgatgttggtgctggtactggggacggaagtggcagaattgccctgtaccggcgaccatgcgtacatgtcgccgtccttgggctgcgggttcgtccaggtgaacgtgacggtggtgccgtcgtaggttccgttcaggttttcgggcgtcggcaccacttcggctcccgtgatgtcgtcgggattgccgtccgttccgttggagtcgccggtggcgcccggcgtggagaccgatgtgcggttgcgcgtcgcggtgtcatccatgtgcggcattacgacgaagacgaacgtcaggacgaccgccgtcagcgcagccacgaccacggccgtgatggccagcggcttcttccacgcaccggtgggagcgtccattcgcgtcacgttcgcggggccgggcgcgacgcggcgcttgccggtcatgctgctgggatattcggggacgccttccacggtgacgggcgtggcatggccgtagtaggcctgttgcacctgctgcatcgcgcgggcgaattccagcgccgtgccgtaacggttgtccgggttcttgtcgagccccctgacgagtacacgttcgacgtccgcgggcacatcagggcggccgattggcggcaggcggcgactgacgatgacctgcgcgagttcctgctgcgtatgcgcctgataaccgtgctcatacggcgaacggccggtcagtgtggcgtacagggtcgccgccaaggagtagatgtcggcggcttcggtgccgccgctgcgtccggtcagcacttccggcgcggcccatggcacggagaaaccggtctgggttcccgcctgatacacgttcgtggagatgccgaaatcggcgagcaccggcagtccctgcggggtgatgaggatgttcgcgggcttgatgtcgcggtgcaggatgcctttgcagtgcgcggtgaacagggcgctgcaaagtttgatgcccaggtcgagcatctggtcggcggtgagtggtcgcttgcggatcagctccttataggagccgccgggcgcgtattccagcacgatgtagccaagtccggtgctggtcacgccggcgtcgtggatggaaaggatgtaggggtgcgcggaaagctccgccatgtagttcgcctcattgcggaatcgggcggctgcgcgggggtcgagggtggcgctgctgaccttgatggcgacgtcgcggctggggacgcgctgatggtaccggtatacgctggctgtggcgccggtgccgagtggctggatgaaatcatagccggatatccgcggcggtgttggctgtgccggcatttggctatccccccttacgacatctcttcttcttactctattccgaggtgttcccacgcacaacccttgatggggagcgctgaggagcgctcgccgcaggcaggagctgccgtgcgatgacgcagttagtccagaataaaactgatataaaaacggaacatatggttcggttttcgattgttggcatatgatggaggaactgtctgacggacgacggggccggcgacgggaatggaggtgccatgaaggcggttgaagcactgcttgagggggaatccggcaaggcgctgctggtggttggtgctccttgcgtgggcaagagcacgctggcccgtgatgccttgatggccgggctgcgacggttcggcgaatccggagcgataatgacggtatccgggcgtcagatcgccgatgtgataggcgatcaggtgattcgcgagctgggggcgacctcccaggcgcgaccggtcacgacgctgtcggccatcgcgttccggctgatcaccgtcatgcgttcgaggtcgggcgagccgctgccgaggttgctgaacggcgccgagcaggatgcgctgctgcgttcggtgtgctccgtccatgtggctcatgtgcgggcgggggatccatgcggcacgtgttcgttgctgcgcgaatacttcgccagggatgattgggacggcgtgctggccgatgccgtggccgggaacgacggcgagggtggtgatgcggattccggcgtaggcgtcaatgccgccttcgtcatgcagctgcgcgacatgttggcccgcatggatgagctgggcgtctccgaggatcgtgaaggaacggccctgtcggcgttgaggcattggtcgccgcgcgtcgagcgtttgcatgtgcagtggcgtctcgcgttcgcgttgcgccgcgaatacgagaccgcggtgagtcgtatgtactcgggcgagtaccggttggactcgtcgcgtctgctggtcgagggggccaaggcggtcgggatggtcggcgatgacgatctgccgcgtctgctggtcgtcgacgactgtcaggacctcaccttcgccgggttcacgttcctgaaggcgctgcgcggtgcggggacgcggctgctgctggtcggcaatccggacgaggccgtgcagaccttccgcgggtcatatccggaatacctgttcgaccagattcgtcgtcagcttggcgccgacatggttcgtctgtcggctggcggtgccggaaatggccgagttgaggagcgtgcggtggaccacgtcgacggttatacgtatcgcgatctggtcgcatcccgtatctccctgtccatccgatccacgcaggacgagacggttcctctgccgcagaggccgggcaaattgccgcagctgccggcgagcctgccgattgtcgcattgccccaggccgatccgctgccgggcgatggcagtctgaaaaccgcgctgtaccgctcggccgacgaagagacggaagacgtcgtatggcgcatcaagcaagcccacatccttgaaggacgcaactggaacgacatggctgtcatcgcgcacgacaacgccaccgtgcgcacgatcggcgaacggctgcgtcatgacggcgtgcctgtacggtattcatcggtcacacgaccgttgaaggacgagccgttcgtgcagggattgttcgcgctgctcgaattggcgatgctcaggaaccagacggtgcccgcgctgggcatgaatctgcagcagaccgcactgtatgtgcgctctcgggttgccacggtgatgggatgcccgctggtcagcgtcggcggcggacgggatcatgagggatacccggccaggctggagccggtggacgccgccatgaacgcgttggcatcactcggcaagatcgtcacgtgcgaggacatatgcaagggggatgcgtccgacgatgtgcctggcggtgccgccgacgatgcggggaagaccggggacgctggaattgctggtgacaccgctcgaatgcatgccttgggcaggctcatgcacggatgggagcaatggcgcgaatgggtcgtctccgggcgcgatcggaagaccatcaccgacgacacgatcatcgatgtcaaagcaccgcaaggcgacgaactccagttcggcgtcgatgccatgtacctgttgctggaattcgcggatgacgcgcatgcgatgcatggcggtgtcgccggtctaggcggtacaggtgacgttgtcgacgatgccggttccgctgtcggggcaggcacgaagggcgcgtccggtataaccgccgatgacgtgctcgccgccgttcaggaggtgtgcgggcggggagacccgcattcccgcgtgtttgcccacctgtggaatctggtggggacggtggcccagggcctgagacaactgccggcgaaggaaccacagtatgcgttgtccgtggcttggaacgcgtgcgacgtcgcctcccgttggcagcgcgaggccctgaacaacacggatgccggacgtgccgccaacgaccgtctggatacggccatgcggctgttcgactatgcatccggctcggccgcaagccgggatctgcccgaattctttgcgcaggtgagggcgatgcgcatcgaagcggattccctggccaaagtggcccccatcgacgatgccgtgacgctgaccacaccggcgggctcatcggggagacactggccgttggtgtggattccggccatccagcaaggcatatggccgaacctggcagcccgaaacacgatgttcggtggtgaggatctggctgatgtcatgctgtatggagggctgtccgatgattccggagagcatggcgacaacaaactggaatccgtgctgtatgcggagcagaaaagcctgctggtcgcgctgacccgcgcatcggagcaggtcacggcaagtgcggtgtacaacgacgatctgaccccgtctgacttcctgtacggatacataccggaacgattcaaccgcgaacggcatgcgtcggccgaagggcgggaatatacccaggtcggtgaagccggacggctccaaggtctggacgccgatcctcgcggcctggtcgccgccgcccgcgtggcgctcgccgtacacccacgaggttccaaggaatctcaagatgccgtggatgcgctgcgactgctggcaaacaatggtgtcgaagccgctgacatcacgcgttggccgttcctcgacgaggtcgaggatgcgtcttccggctcccgcacggtgggatcgcgggcggcggctccggaaccggacaaggccgcggagggaaccggccaatcatcggtgccgcggatcgcaacattgtcgccatccgccgtggacagcatctggggatgtcccgtctgttggatgatggaaaaccggttcactggtccgcgcgccggcagtgtggcgacctcgttcggctcgctgatccacgccgtcgccgaaaccgccagcaacgagggcctggacgcggcggactggcgcgatgacctgccgattccggaacgcgtcagcacggtacgggaccgtatgatcgccatctatgaggagctgcgcgacgatccgacggccaacaccaacccggccgatcaatacaacgcgacgcgcaaggacaataccgcgcatgacgtactgggccacatcgccagctacttcgtcatgtccaacaccgacgaatacccggtaaacaacgtcaagaacttccagatcggtacattggaaagcgcacaatgcgagcgttcgttcattgcggtattcagcttggacgacattcttgccgcctataacgcgatggacggcgtcgacccgatcggccgcgatgaactcgccgccatcatgggatcgctggttggcgggtggcccgaagccatgaacgaccggctgaccgtgcgtctgtccgggcgcatcgaccgtatggagaccagaatcatgcccgacgggaagcgtcacgttcgcctgatcgactacaagaccgggaaggtgccttcgaccaaggccatattcaacgatcttcagctggtctgctaccaactgggactcgcattcccggaaaacgggccgcgcggagccgaagcgctgcaagtcatgccggacatcgcgcaaagtggtctgttccatgtcgcacagaaggatgcacccgcgacatccggaaccagcaacgcgcaggagggaatgtaccagccggcgctgttcgccgatggcagtctgaacacgtcatcgttcatgccgcggaaccgctacaagaccctcgataagctttcggatgctcccgatttgattgaagagcctccgaccggtgtaagcgcagcggcatggcgacagttcctcggcatgcgcggcacgcaggccgtatggtcgctctccatgatcgcgagagtgttctacgccgccgcggcgagtcggtcgacccatatacaggcaaggccgaaaccggatcatctccagtattgccgcatgaaagcggcatgcccggcatgcgccggcgaaatcaacaccgtcttcgaaacgaggcagtcatgaacgcaccacgatttaccgacagccccgagcaggcaaaagtcgtcaacgcgcccaccggcgatgacgtgctcgtcgtggccggagcgggcagcggcaagacctatacgatgacccgccgcatcatcaacctcatcgcacagggcgtgccggccgagcgcatcctcggcctcacattcacgcgcaaggccgcgtcggaactgctgtcgcgcgtgtccgccgccgtgctggcggacgggggagacgagcgctttgcgaaccgggcgttcctcaagccggaggtgtcgacgtacgatgcgttcttccagaccatcgtgcggcaatacggcctgcttgtcggcttcgaccagaacacgcagccgctcagccaggccggtgccatacagctggcgaccaccgtggtcggccgtcacatggacatcctcttcgagcaggatctcggggcgttcaagaccgtggtgaatggggtactggggttgtcgcatgccataggcaacgccatgatcggtggcagcacaacaacgatggacgaggccatcggccgtgtgcgggcttgggaccaggcattcctcgcgcaactcgatatcgccattggcgatacgccggttcctgacgaagcgccgaagaccaaggttccgacaaaaaacaagaaggacacggaggagaccttcgcggccaaacaggaggaataccgggcgcaacttcgtgacatatgcgtgtacaagtgtgcacagctgcgcgacgtgacccggcgtcgggagacgctgctgacgctcgtcgaggaatacgagcgggaaaagcgggttcagaacatggcggaattcagcgatttcaccattgccgcctaccagctcgtcgcgcgattcccctccatcggggagcggtaccgtcgccgttacacgcacgtgctgcttgacgaataccaggacacctccaccacgcaggcgatgctcctcgccaccctgttccacccccagtcggctgatgccgatgctgataggtcttcctcccgctggcgggaggcggcgcgcagcgccggagagtggtccaaggatggcgtcgggctgtcgcgatccgcggtgaacgcggtgggagacccgttccagtcgatctatgcgtggcgtggtgccagtcccggagcgttccgcatgttccaaaaggacttcggcatgccctccgacgcgaaaccatacccgctcagcgtcacgcgacgcaacacctgcatcgtgctcagagccgccaacaacctcaccgagccgctgcgcataccgccacggcgggccggcagctccctgatgcgcgaagtggatgtcgcgaacctgtccgcgatggacaacgccgcggaaggtacgatcggcgtgctgggatttgccaccttcggccaggaagtcgatgccgtggcacgtttcgccaaacaggccatcgcacggtaccggaaggacgacgccgccacggccgcctccgataccccgcatgtggcggtgctgttccgaggcaagacgcacatggcgcaattcgcccaagaactcgaacgggcgggcctgacgacgttggtcgtcggctactccgcgctgctggagaggccggaggtccaggatctgatcgcattgctgcatgcggccgccgaccacaccgattcagcgtcgttgatgaggctgctggctacgccgcgattcggtttgggatccgaatcgctcacccgcctcgccggcatggccgaagatctcgacagccaatgccgctaccgtgcactggtcgaatccggcatcataggttcaggttccgatggcgctcgtgccgatgatggtcatgatgaggcaatagcctccacgtccattgattccggtctcgtttcggaagcggatggtggctccgacatcgcgacgttcgccgacccgcaggtgaaggccatcgttaagcaataccgggatcgagtgccgcatgcggtgttcctcatcgatatgatgatgcgggatgacctgccgtcgctgctgtcgcgtcgcggcggattcgacgagacgacatcacgccgtatcatacaggcgggcgaagtactgcagcgtgtgcatgccgtgactaatcacccgctgaaggaagtgattgacgccgcggtgcgggccttgaacctcgacatcgacacaatcgtcgcccaggcggtcaagaacccctcccagccggtgaaccccacgcaggcgcgttcgcctctgcagtcggtcgccgcactggtcgacacctatacgcaggaaatcgtcgaaggcgtgaatccgactttacgtggattcatgtcatgggttgactcgcttggccagatagaggaggataccgcggcggtgcccgacactcctgcggacgtggtgctgatgaccatccatcaggccaagggattggaatgggacgccgtcgccgtggtgtccatgcaatcaggagtgttccccagcaatcagggcggtttgcatgtcgagctggacgcggagcatcccggcggcggtgccggcgaatcgtggactcccccggaatacaaggcgacggttcgttcatgggcggacgacccggccgcggtacctgcacccgtgcgcgtcgacgccggtatcctgccacgtttcccgcacgacgcgaatccggatgacgccccggtcgaaacgctgcgtgccctggacgatgtcgaagtcatcgacgacgagttctacggagacctgcgcagcaaggacatcggagacgatatggatgtcgccgacccgtccagctggtatctcacccaggaagaggaatatggccgacgtctgctggctgacgaacggcgactcgcatatgtggcgctgacacgggccaagaaagacgcgctgctcacctacagccagtattcgattctggatcgagacccgagccagtacctgaaccgtcccggcaaaagaccgagcgcctcgaagccgtcggtattctggacggagatgcaggactcgctatgccatgagagcggtctggtatccgcgtgcaagagcgggagcgcgggatactccgaaaatgcggatgccattgccgacagtagccctgacttggcggtggccggtgcggcatcaggtgcgtctgcgcacccatcgctggaccagctgggtgtggacaggccgcaggggttcttcgtcggcgaccacgccaccgaatatgagcgggatgtcgtcgaagaggcatggaacgccccattggaggaacgcgaacagggcggcggcccgacatggccggccaagttgtccgaggaaaccctgtcgaagctcaccggcgggatgtccggcgattccgggcttgtgaccgacgatccggactccctgctggcacgtgcccgaatgctcgttgaagaccccgatctgatgccatggtccttcggccgaggcgagcgcgagatcgaccgctatgtccgccgtcaggcggagcacctgctggagcacggacggcagaacgtcaccgcgttgcaggtgagagcggggcatatgacccagcgcgaggaacgcggctattggcgtggcctgatccggcccatcccgcgcgtcgcatcccccgccgctggggcgggcaccctgttccacgcatgggcggaacaattcatcaacgcctacggcgacggccaatcaatagatgcagacggcatcggcgcatacgattccagcagcatcgaaaccggtacggccggcacctgccgcgagccggtgacccgcgaatccctgctgcacgatctgtccgaactggaaatgaaatccgacacactgacggcgaaggaacgacagctcaccgtatggcagcgtcgactcgccgaatcgacgtggtcggagcgtcgcccggcgtgggcggaacgccagatcgtcgtgtcgattccccagctcggtgacgtcatcgtcaacggcaaactcgatgcggtgttccacggcggactggacgcgaacgatccgacgaagcaatacaccatcgtcgactggaagaccgggcgcaagccacgcaagccgcaggacatcgaacacaagctcgtgcagctcgactggtatcggctgctgctgtcgtacatcgagcacgtgccgctggacagaatcgacgccaccctctactatctgagtgagcctgatgaaggcgcgcgcgagctgcacgcccgcgcgaaaaccgaacaagagatcctagccgagttgagctccggcattcccgaaggatccgacaatgactaggtgaccgccaagggggcggcacacgctgcggatggaacgcgccgcagccgtcatgccgggagggatgccgcgacccttggcgcaccgtgtgggcgggcacacgtgccggacgcaacaaccacaaaggagcagaaccatggttgcgcacgacaacaccgtcatgaatgccaccatcaccaatgccacgccatccgccgatgacgagagcaccctctcggagagcacgccgatcgggacggacccacagcgtgacgtcatgtctgacgtcgtgcctgacgtcacgccggaggaggtgccgggcgtcacaatcgcatctacgccggcaacggcaacagtgcccgccgaggagatgaaaccatcgcaatcggtgacctaccggcccatgcgttggaatgatctggacgacatcgtccgggagttcgaccgcacatggggtcagtgcagcgcggccgccggcacgccggtgtccatgcagatatcccggcacttcgtgctgcactacctcgaaccgaccacccgcgccatcatcgccgaactcgacggccgcttcatgggcgtcacactgtcgcgcgtcgccggcgagccattggccttcccgcaagccaagcaggaactcgccgcgatcaacggcgaactgaaccggtcgacgctcggcacgaaaaccctgtccgagaccgagcaatggcatgagatggaactgcgcatggaacgcgaaatcgacatcaacgacgtcgcgcgcggcgagatcgagctgttcctcgtcgcgaaaagcgctcgcggacacggcgtcggcggttcgctctggcggcaggcgatggactatttcgcgaattgccaggtcgcccggttctacctgcacaccgactccagttgcgacgtgagcttctacgaccacaaggggctgaactgcatcgccgcccgatacgcggcggaccatcccgaggatggcgcagacatggacgacatcttcatctacgccggaaccccggagaacactcgatgagcggggctcaacagcagagccgatccgtcgcatcgcagtcgccgtacgcgcaactgttccgcattcccggcgccaaggcgttctgcatctccggagcggtggcccgattgccgatctcgatgatgtcgctgggcatcgtgctcgcgctcaaccacatgtacgacaactggacggtcgccgggtcgatgagcgccatgtacatcctcgccgtcgccgcggtcacgccgttctacgcgcgcctgttcgaccggttcgggcagcggcgtgtcggaccggtggcgcttggcgtgcagatagtggcgatgcttgcgttcgcactggcggcgctcgcccgagtgcccatcccggtgctgttcgcgctggccatatgcatggggctgacccagttctcgttcggcgccctcgtgcgcacccgctgggcgtatgcgctgcgcggttcgcagcacgagtcgctgctcaacaccgcgtatgcgctggaagcggccatcgatgagatcgtattcatcttcggcccgattctggcggcgttcctcgccacctcggtgcacccggtgtcgcagttgttcgtgcccacgctggcctgcggcatcgggggagcggtgttcttctcgctgaagaacaccgtcccgcccgtgttggagccgattgacgtcgtcgccgccgaaataccggacgcgcagtcgaacgccgtcaccggtcagccggctcccgcactccagacggccggagaccatgccgcaccgacgccctcccccgaagacaacggtttccggctgcgtcgtctgcaccggccctattccgccaagccgcgcaatgtactgacgtaccggggcattctgccgctgctggtcgtgttcgtggtgttcaacatgagcttcaccgcattcgacgtgtccatgacggccacgatgaaggccgccggcgcggagcggttcctcggcctgcagctcgccatgttcgcggtcggctcctgcatcggggcggtcatcttcggttcccgggagatgaaaggctcgcactggcggcatatggtcatgttcctgacgctgctcaccgtcggctatgtggtgttccgcatggtgatgggcaatttcctgatcctcggcgtcatggagatcctgaccggcctgtgcgtctccccgctgttcgctaccggcaacctgatcgtcaaggacatcgtgcccgcgcgctcgctcaccgaaggactgtcgtgggtgaccaccgcaggctcggtcggcacctcgttcgggtcgaccatcgccggtgccgtgctggacgcatccagtccgcacatgagcatgatgattccgtggatcgtcaccctgtgcgcggtgccgctcgccctgctcggctggttcctcgcccgaaaacggcgctgacgtccgtcagccatgtacccgccgtggaacgcgatgacgcagaagcgcgtcgccgtgccgtcaacaatcgccttggcatacggcctgcgctcgtacaggctcgcgccggtctgagcacctgagccgacgccgtcaccctcgcccgcgctcctgcgcagatctccagtatctgcgcgaccctgtcgttcacgtccgccttcgtggcaagccggtgttcgagcaacggctcgccgatggaccgcccgatggtcatttgcgggttcagcgcactgtacgggtcttggaagatgtactgcatctgcggacgtatcgtgcgcagttcgcgctgggggagcttgaacaggtcatgtcccttgaacagcacctcgtcgcgctgctcgatggcctgttcgtggcgcgactggtagtcggccatgatacggtcccagttgtcctccgaccacgagcccatctgcactcacggtgtcacctcggaatcctcgcacgtcttaaggacggaggtctttgatgcggatgaccttatctgccattcgacgtttcctttttgacctcgaacgggagtccctgttccctgacgacggccttcaggaagatcgtgaccgcgccggagagggtgagcccgaggtcttcgagcacgcggctggattcctccttgagctgcgggtctatcctcatggtcgtggtgggtatgctcgccatatgcgcctcctatgcttgtcggttgttctgactgtacatcgtatgcacggtgtcatgcggctttccgccaataatccatgtacggtggtgtcatgcgctggcagtcacggcggcggatgcgatacaggcctttgccgagctggcgggcgagcagcccatcatcgtcggtttcgccgaatccgtcgatgaacgcgacgagccattggaaccagtccaggtaggcttgcaggtatttcgttgacacgccgtggaagccgaacatgaaagcctccaatcgcgcgtgcagcgtgttcacgcggttgatggcgtggtcgcgctcctgtggcgtcagttcgccaagttccttcctgaccctattggctatacgcgccaccttgcccgttctcatacctaccaccattgtagctacccagtaactacactgcaaggcaaaaagtcaaccttggtctaacagagccaaaatctatgaagccgtatcagtgcgttgtggaacggtgcgccgaaccggtcggagccgggatgtgacccagcttacggacaggtggccggaccatgggccggcatgcctatatattggtagggaattttggaaaagttacggacggtttcgctcggaaaggtcgtgtgatggtcagggtttcagtggtcggcgccaaagggcgcatgggatctcatgtggtggatgcggtgaacggcgcgcaggacatgcagctcgccttcgcactcgacgcgggcgatgacctgatgcggatcacgccggagaacaccgatgtcgtggtggagttcaccgtgccgtccgtttcgctcgacaatgtgctcgcgcttgtgaagcggggggtcgacgtggtggtcggcaccaccggttggaccgatgagagactcgccaaggtcacggcggcgctcgccgaggctccccgtgacgatcaggccgtgttcatcgcgcccaacttcgcgatttccgccgtgctggccgattatttcgccaaggtcgccgcgccgtacttcgagtccgcagaggtcatcgaactgcatcatcccaccaaggtggatgcgccctccggaaccgctatccacaccgcccgcgccatcgcggatgcgcgcaaggcggccggcctcggcgccatgccggacgccaccgagacggatggcggctctcgcgggcaggtcgtcgacggcgtgcacgtgcatgccgtgcgtctgcgcgggctcaacgcgcatgaggaggtattgctcggcaatgcgggcgagcagctgaccatccgcgccgacagcttcgaccgcatcagcttcatgcctggcgtgctgctcgccgtgcgcaaggtcgccgacggcggtcatgccggcctgaccgtcggcctcgacaagttcctcgacctgtaaagcgttggcctggcatcccccatccggcgataatcccgtttggtggggtctggatgggactttggtgggatgaaggaggtccgggacgcgttcatattatgtacgggtgacggcgatgcgtccttgctgccaagtacggtaaagagatatgagtgacggtactatgcatcttctcaacccggctccgttcggacgcatcctccccgcaatggtcacccccatgaaagcagacgggacggttgatttcgaggccgcgcagtctctggcgaagcaattggtcgccgacggcgccgacgggttggtggtgaacggcacgaccggcgaatcccccgtgacccacatggaggagaaggtcgagctggtgagggccgtcaaggaagtcgtggacgtcccggtgatctccggtgccggctcgaacgataccgcgcacaccgtgcgcatggtcgagcagacgcaggaggcgggagccgacgcggtgctcgtggttacgccgtactactcgcgccccagccaggacggcgtggtcggccattacaaggccgtcgattccgtggccgagaggccgatcatcgtatatgacgtgcccggccgtaccgggctgaaagtccgcgtcgaaacatatgaccgtcttgccgagcttgagcatgtcaaagccgtcaaggacgcgaccggcgacctcgccgccgccgtcgaaaagcagcagcgcaccggcctcgcctggtattcgggtgatgatggcctgttcctgccgttcctgtcgatcggcgccgtgggcatcatctcggtgatcgcgcacgtcgcctcctcgccgatgcgccagctggtcgaggcgttcgaccgcggcgacatccatcaggcgcagcgcctcgccaaccagctcgccccgctcgtccacgcgctcaacggcgacggctaccaggccgtcatggccaaggcctcgctgagaatcaagggctatctttcctccacggccatgcgcctgccgaacatcggcccggacgccgatcaactggccaaggccgaagagggcatgaaagcagcgggactgctctgaccgggccacaccggcctcgctcgggatgcacccggattacggcatcgtccgactccgggaacggccgtcccggtcgcggatgcgaacggcctcggcggacacgggcgagcggttgcagataacgtcgtttccgtgacacagacggaaacaaagaaacagaaaaccaatagagaatggcacaagaacaacaaaagaagaacaactcacgcaggtcccgttccggtggcgcgtcgcgccgccgcggatccgcgaatcgcaacaccagcaacgccggctcgttcaagggccaggccaccgctccccagcaggacgacgtcctgatcgccccgccgaagtaccgcaagggttcgatgcgcatcacgccgctcggcggtctgggcgaaatcggccgcaacatgaacgtaatcgaatacaacggtcacctgctgctcatcgactgcggcgtgctcttccccgaagaggagcagccgggcgtcgacctaattcttcccgatttcagctacatcaagaaccgtctcgacaaggtcgacgcgctcgtgctcactcatggccatgaggaccatatcggcggcgtgccctacctgctcaagctgcgcccggacatcccgctgatcggctccaagctgaccctcgccttcgttgaggcgaaatgccaggagcacaaccagcatcccaccatggtggaggtcaagggacgcgacaagctcaaggtcggcccgttcaacctcgaattcgtcaccgtcacccactcgatccccgacgcgctcgccgtgtacgtcaagacgcccgccggctccctgattgacaccggcgacatcaagctcgaccagctgccgctcgaccacaagatcaccgatctggtggaattcggcaagatcggcgagcagggcgtggatctgctgatgatggactccaccaacgccgaggtgccaggcttcgtcaagccggagacctccatcggacccgcgctcgaccaggcgttcgcgcaggcgagccgcaagatcatcgtcgccagcttctcctcgcacgtgcaccgcgtccagcaggtcgtcgacgtcgcccacaagtacgggcgcaaggtcgtcttcgtcggccgctcgatggtgcgcaacatgtccatcgccgccgacctcggctacctgcacatccccgaaggcaccgtcatcgacctcaagaaggcgcacgacgtgcaggacgacaagctcgtcttcatgtgcaccggttcgcagggtgagccgatggccgccctcggacgcatcgccgacggcaaccaccgcgacatcaccatcaacgagttcgacacggtgatactcgccagctctctgattccgggcaacgagcacggcgtgtacaaggtcatcaacaagctcgtgcagctcggcgcgcgcgtcgtcaaccgcgacaacgcggccgtgcacgtgtccggtcactgcaacgagggcgagctgctgtacatgtacaacatcgtcaagcccaaatgcgcgatgcccatccacggcgagaaccgccacttggtcgccaacggcctgatcgccgtcaagaccggcgtcgatccgaagaacgtggtgctggcggaggatggcgacgtcgtcgacctgtaccacggtcaggccgcggtcgtcggctccgtgccgtgcggctacgtgtacgtggacggcgattcggtcggcgagatcaccgacgaggagcttgagaagcgccgcatcctcggcaccgaaggcttcgtgtccagcttcgtcgtggtcgataccgaggcctccgaagtcgtcaccggcccgaagatcttcctcaacgctgtcgccgaagacgaaagcgagttcgacaagatccgccatcagatcgtcgagcagctgcaggacgcgatgatgcaggggacgaaggacacgcacagactgcagcagatcatgcgccgcacgctcggcggatggatcgcccgacagctgcaccgcaagccgatgatcgttccggtcgtcgccgacatcgcccaggacatcatcgaagaacccagcaagtaaaccgcttcggctcacgcaagtgacgccggcatacgtcccagaagcaagcctgaacgtcaacgtctcagcgaggagtagggaatcgcgtgaacggttccttgttcctttttctgtcgtgacggtcccggcttctttcgggaagacatatcagaaggagttagaaaatatgccaggtgcaaaccttacccgcgtggaagccgaggaacgcaagtccatcgtctccgcccccatcagctaccatgtccagcttgatctgacccgggacgcgcgcacgttcggctcgaccacgacgatctgcttcggcgccgagccgggcagcgagacgttcctcgacctgatcgccgacaacgtgaccgagatcatcctgaacgacgaggcgctcgaccccgcgcaggtgttcgaggacaaccgcatcgcgctcaccggcctgcgccgccgcaacgaggtcaccgtcaaggccgactgcgtgtactccaacaccggcgagggcctgcaccgcagcgtggacccgtccgacggcaacatctacctgtactcccagttcgaggtgccggacgtgcgccgcgtgtacgcggtgttcgaccagcccgacctgaaggccacgttcgacttcaccgtgctcgcgccgaagtcgtggatcgtcacgtcgaacatgccggtcaagtccaaggaggacgtcgacgacgtcatcaccgcagacggggtgctcggcgaccacgagcccgaatccgcccgcagctggacgttcgagaccacgcctatcatgagctcgtacctgaccgccatctgcgccggtccgtacgccgaatggcacaccacctacctcaacgaggacggccgcaccgtgcctatggcccagtactgccgccaggcgctcgcccccgcgttcgccaaggacgtcgactacctgttcgacatcactaagaagggcttcgcgttctacgccaagacgtggggcgtgccctacccgtacgccaagttcgaccagatctacgtgcccgagtacaacgcgggcgcgatggagaacatcggcatggtcacgatccgcgaccagtacgtgttcgagtcgaaggtcaccgacgcgctcgccgagcgccgcgtggtgaccgtgctgcacgagctcgcccacatgtggttcggcgactacgtgacgatgaaatggtggaacgacctgtggctcaacgagtccttcgccgagttcacctccacgctcgccaccgccgaggccaccgaatggcatgacgcctgggccacgttctgctccggcgagaagagctgggcgctgaaccaggaccagctgagcaccacgcacccgatcgtcgccccgatcaacgacctcaacgacacgtacgtcaacttcgacggcatcacctacgcgaagggcgcctccgtgctcaagcagctcgtgtactacgtcggtcgcgagaagttcttccagggcatcaaccagtacctcaacaagtacgcatactccaacgccacgctcgccgatctgctgcacgagctggagaaggcgtccggccgcgatctcaaggcgtggagcgccaagtggctggaggagtccggcatcaacacgatcgccaccgaggtcgaggagaacgcggacggcaccatcgcctcgctcacgctcaatcagaccgcccccgccgagcacccggtgttgcgcccgcatcgcctcgcggtcggcttctacgacgaggatccggccaccggcaagatcgtgcgcaccgaccgcttcgagcttgacgtggacggcgaatccaccgtggtcgccgccgcagccggcaagaagcgccccgcgttcatcctggtgaacgacgatgatctgacgtacacgaagctgcgtttcgacgccgattcgctctcgttcgccctggcgaacctgcagcatttcgatgatgcgctcgcccgcgcggtcgtgtggctgtcgctgtgggacatgacccgtgacggcgatctcgccgccgagaagttcatcgacacgacgctggcgctgctcgccaccgagaccgagtccaccacgttccgttacgcgctgagctgcatgagcaccaccgcgtggcactacaccgcgccggatcgccgcgcggacgtggtcaagcacgtcgccaaggagctgtggaagctcgtcatcgccgctcccggcggctccgaccagcagttccagctcgtcacggcgtacctcggctacggcgaggagggcgacgccgagttcgccgagcacgcgcagggcctcttcgacggctcgctgatcgtggtcggactggagatcgacaacaacttcacgtggacgatcatcaacgcgctctcctcggtgaagctgatcgaccaggccggcatcgacgcgcagctcgccaagcgtgacaccaccgagaaccgcgagttcgcgctcggcgcccacgcggtgcgtggcgacgccgccgcgaaggagtgggcctggaacgaggcgctcaacaacgccgacctgaccaacatgcagctggaggccgtggcccgcgggttcgccgccactccgcgccccgacctggccgagccgtatgccgccaagtactacgacgtggtcgactgggtgtggaagaacaagagcttccacatggccgaggcgctgcttgagggcctgtacccgtactacgctgacccggccacgctggtcgaactcggccatcggtggctcgccgaccatgaggatgccgacaacgccctgaagcgcatcgtgcgcggcaatgtggaatcctcgcagcgcacgctcaaggtgcgcgacttcaacgccgcgctgtaaggcggcgcgaccgacccatacgaaacgcccttcgcgtaacgtgcgcctgcaaggccgccgttcgcgcgaagggcgtttcgcgtgcatgagtatgcaccgacggtgcggcagagtcgtcgttgccgtatcgccgtgttgccgtgattcgttgtacaactcccgcatatcagcgaaacgcagatgttgtgcacctacggcgctgtacaactcccgcagacgggcaaaatatacgtgttgtacagtgacttgaaccgcgaaatcgttgatttcaagccattctcttatcgcgcctaaatatctgccgtcgtacaactcctgcataatgcgtaatcgcggacgttgtccagcgtgatgtaccgtgccgtcacatgccgcgcccctgcgactgcgccgttcactgcccgtataccgaaatgttacgggaaaggggtattgctgaaagcttcatgagagtacactttcggattgtagggggttcatcatgaaactcctcggcgatatcatccaaagacggcgtgagccgggaagggcaggttcatggtttctcgttggtcgagggtgaaggccggatgcgcgttcgcgctggcatgcgtattgccttgcgcgttcacgcccggtgccttcgcggcggatgacgggcgttggccggtggtgaacgacacggtggcttccgcatggaagcagggcattgacggttccggtgtgaaggtggcggtgctggatacgcaggcggtcgaggattaccccgcgttgaaggacgcctcgatcacatacaagctgggacgattccataacgtggatgacaagacggtcgagtgcaaggtggacggcaagccgttgaccgcgacgatcaagtccggtgaaggcggctactactcctcgcacggcaccgacatgctggcatggatcgtgggtgatggaagcaactacacttcgaagtggcccggaatcatgggggcggcgcccaaagcggacgtgttgcatattacggatggggcggttaatgcggggcctgttgtgacaccttgcgatcagaaactcgcgggtgatgcgacaagcgacagtggtgcagatgtcaagacggcggtggactgggacgctcgcatcctcaaccgttcccagggaggtgatctcgtcagcgcggattatgccgggtatgtggatgccctgcgtcatggggtcgtcatggtcggaggacgtgcgaatgacatgaatcccggcttggatgatctgaccggcgacccgcgcagcatggagaccttccccggtgtggtgatggtgaacagcgtggacgagtccggcaccctggcttccacctcggatgtcatggacggcaatgtggcggtgctgtcctatggcatgaacgtattagacccggtcaatcctctttcgaatgtctacaatatcgcgggcaatggcggcacgtcgaccgcggccgcggtattgtcgtcgtacctggcgctggccatgcagaagtggcccgacgcgacgggcaaccagatcatccagtctttgatacgcaacacgaagagcggcaaaggcaagccggtcatcgacccggagcgcaaacgcgggttcggtgaggtggacctgaacgcgctgctgacggtcgatccgacgcagtacaaggacgtgaacccgattctggaataccagatgaaggccgccgcccaatacccggccctgaaggactggtatacgcaggattgcaagacgaacccggacggcgttggcaccgcggcggataatgtcccgtgtgaggccgggctcatcgggcgggagtatgagcgtcagcaggcggcgtggaagaaggtggagcagtgccgatcagacggcggctccgactgcatgaaatactccgccacgaacaccgccgatggtgagaccaataacaccacgacaccgaacgggcaggccaagcccgaaggagacccgtcgcagagcgcttcgtccggcatgccggtgtggctgtggggcgtgatcggcgcaggcgtggccgctatagccgcgggcgtgataatcgccctggtggtgtctcggcggcgtaggacgcgcgcgcggattcccgtatccggtgtggcatatggcagtgttcgatcataccccaacggacccgtgccatcccgcccatattctggtggatcacaggggagtgggggccaggctccgcctgccgaaccgggtgccggaacagccgcctagccagccgcagcagccatatcctcagcaggtcccccggcaaggattcgctccgccgcaaccatacccgccgactgaaccggctcccggagttccagcccctgacaaccatggtggcaatggaaactccggcggacatggacggcattcagggtaatgaccacagcagagaaagccccaatcggccccttctctcattggcaaatgactcgcgaatctgcttgtattctctcacatgtctttctccgaaactggcaattgcgcgtgatttgggcagtattcatggatatgggatgcaatcgcttcgccggccggttacgatggtgctcggtatgtcgaagagacggcggaagccgtcgaagcaaaggaatcgcagattatgccgagattgtttggaaccgatggcgttcgtggattggcgaacagggatttgaccgcgcgtctggcgcttgatctgggggatgccgccgtgcgcgtgctgggcaacagtgccgtcagggaaggcctgccggagggccgccgtcgtgcgctgatcggccgtgatacgcgcgtgtccggtgattttctggcgtccgcgctgtgcgccggcatgtctgctggcggcttcgacgtgatcgatgcgggcatcatccccacgccgggcgtcgcgttcctgacctccgtgctcaacgtcgagatgggcgcggtgatctccgcgtcgcacaaccccatgcccgacaacggcatcaagttcttcgcgcgcggcggtttcaagctgcccgacagcaaggaggacgacatcgaggccgtgctcggtcaggactgggaccgtccgaccggcgcgggcgtcggccgcgtctcgcatgagacggtgaccgccacgaacctgtacatcgaccatctggtgtcgaccatcgccccgctcaacccggacaagacccagcccaagccgttgcgcggcctgaagatcgtggcggactgcgcgaacggcgccacatcggtggtcgctccggaggcgctgcgccgcgccggcgcggaagtgctggtcatcaacgcctccccggacggatacaacatcaacaagaacgccggttccacgcaccccgagcagctgcaggccatggtcaaggccaccgacgcggtgatgggcgtcgcgttcgacggcgacgccgaccgatgcctcgccgtggatgaggacggcaacatggtcaacggcgatcagatcatgggcatcctggcccgcgccaagaaggaggccggcaagctcgccgacaacacgctcgtcgtcaccgtgatgagcaacctcggactcaagctcgccctcaaggacatgggcatcaagaccgtgcagaccgcggtcggcgaccgctacgtgctggaggagatgctccgcggcggctacacgctcggcggcgagcagtccggccacgtcatcaaccgcgagttcgccaccaccggtgacggcaccctgaccgcgctcaccctgtgcaacgaggtcgtcaaatccggcaagagcctcaagcagctcgccgcggacttcccgcagctgccgcagcagctcgtcaacgtgccgaacgtcgacaagatggccgccaccaccaacgcggcggtgcaggccgccgtcgacaaggagtcgaagctgctcggcgacaccggtcgcgtgctgctgcgaccgtccggcaccgagccgctcgtgcgcgtgatggccgaagccgccacgcagcagcaggccgacgaggtgtgcgaccggctcgccaaagtcgtggccgacgagctcgcgctgtagaacgaataacggcaataccgcaataccaaggaatcactcgtatgttcggaaaaaacacgaaagtcgacctcgaactcaaccgtgaggtcgaacagctcctcaaaaccggcggcaaggagcgaatcctgccgatcgtgcaggccggcgaaccggtgctgcgccagcagaccgtgcaatactccggccagctgagcaagggcacgctgaacaagctcatcgacacgatgcacacgacgatgctggaagcgccgggagtcggcctggccgccacacagatcggcctggggctcgcgctcgcggtggtcgaggaccacgtgcgcgacgacgaggacgatccgcgcgagatcgccgaattcccgttccacgccatcatcaaccccagttatgagccgatcggcgacgcgacccgcagcttctacgaaggctgcctgagcttcgacggatatcaggccgtgcgtaggcgctggctcgacatcaccgcacgctggaccgacgagaacggcaagcagcatgaggagcgtctgcacggttggccggcgcgcatcttccagcatgagaccgaccatctgagtggcgaactgtacatcgacaaggccgagattcgcagtctgaccacctacgagaaccttgaggatttctggtgcgacgaccccgtgccgaccgacgccgccgaggaactcggcttcgagctgtaggccggggctgggccgactctggtcgcggctggttacggctaactgctgtacaacttccgcattatcgatatttgcgcgtgttgtcccgcgaaatcagggcgcaacacgcgcaaaacgctattatctcgcaaaataattgcggaaaaacgttgcaattaagccgtttttgccgaatcgtgccggtgtgggtcatcgctgccggctggacaactgccgcaaaagtcgataatgcgggagttgtccagcagacgaacgcgaagaaatccccccccacgagccgattgcacacgaaccgtatacgtgctttagactcggcgatccatcgcggcggacgagcgcgtcacaataccgccgcgagatcggcgcgggcgtcggggaacgtgcggcagtagcgttctgcctcggcactcagccgctcgtcgacgagcagccgctcgtaaatcggattgcgggcgtagcgtccggatccgtcatcgtacgccgtgacgatgctccgcacctgcccggcccaatcccggccgctgatcgcgcgcagctgggcgatggtgtgcaggtcggaggggtcgtacgcctcgacgatgcgctcgcggtacatcgccctgagctcgtcccaacgtcccagcgcctcgaatgcggcctcgcgcagggattcccactcatacgcaaccagatcctccgggaacatcactgtgtactggttcggccggtcgcgctccaccatgtcgatgaagccgatgagctcatcccagcgctccgccgcgataaggcgcgccgcgtaggcatccgccatggcttccgattcgtggtggctcaccaagaagcggtcggcgtcggccgcatcaccgctcacgcgcatcagatcatggcgcaggaacatgatcgattcctcgaactgctggtgcgccgacagcgccaccgtacgcttgatgagttccgaagcgtcggccgtcgagccggtcgcggcctcggcggcgatgacgccatcgtcgtgtgccgtttcgccgtcgcatcgcccgtcctcgtcgattttcgcctccttggcgaaacgatccatcgtgtcaagggcgctgttcagcgcatcataggcgaacatgcgcgtatcgtcccattgcgcgaacgacaggccacacgacagcagctccaccatctgcgtcgcgttcagctggaaatcctcgttgcaggccacccgcgtgatcagtcgcagcgccttctccccgtcctgcgggtcggcgttgcgcgccacggaatccatgtacacgcgcacgttctggatgagctccttgagatagtcgaagccctcgccgtcccggtccgccgcgttgcccacgaatcgcgcggtcatctcgaccgacttcgccagattcgtggtggcatcgacccagcgcgtgctcatcagcgcgttgccgaccacggcatccactcccgacaacgcctgcgaatcgatgcggaacgtgggcatgtcgttgcgcggcatggacacgccgtcctcggtgcgttcggcggtcggcacggtggatgagatggagtcgaagtaccattgcatcgtcaacccgatcacgtcggcgacctcgttgggagcggcgacgggcacattgttgcggttgtcgtcgtcctgggcggacgcgtcggagatcatatggttccacaggaacgtagggccgtcgaaatccgttgatgccagccagctgtcattgacgaaatccacgacgtcgtcgagctgttgccgcggatccacgctgatcgaggtggttgagccatccatgattctgcctccctggttccgctccgtggttgcaagcgtacgtgtagtctatcgcgattgacgctccgacgtcggcaatggcggataatggagaccgtgagcgaacaaagcgtaaaccatgacgagcggcggcaggcggcgaaaggcgccggcgatgagatgacggctgcggggaaggccgagggaaaggccgcgaggaagaccggtggatccggcaaatcgggcgcgacggccaagcccggcgaacggtatgagcggggcacgcgcagctacacgatgtcgcatatccgcgggaaggacacccgcatcgaagtgctcgtgcgccggtacctgttctcgcgggggcttcggttccgcaaaaacgacaggcgctatcccggccatcccgacgtggttctgcccaaatggcatacgatcgtgttcatcaacggatgcttctggcatgcgcatcagggatgttccaagtattccattcccaaatccaacgtggaattctggaccgcgaaactgacccgcaaccatgatcgcgacatcgcgcagcacgccgcgctcgaatccgccggatggcatgtcatcgtcgtctgggagtgcgagctcgccaagcccgtgcgcgaggcgcgtctggaacggctctacaccgagatcaccgcgcctggttccattggcgtccaatgagcttgctggcctcgccaatgcggccggttccatcaatgcaggcggttccatcgtataattccccgattgccggctccacatccggccatagtcccgtgaacgcccggtgaaacgggactttgccgggagggtggtaggcaattacaatcggtggcagtaccgaatggacggcaaagggtgatgcatgatgagcgagacgaaacagccgacgatgtcacgacgcgcacgcgaggcgcagccgttccgggcaatggtgttcggcgagagggccgacgagatgatcgcccgcagcatcagcgtcatcaagctgagtctgggggagccggatttcggagcgccgcccgccgtgcgcgacgcgatgcgagagcaatatgatggccgcgcgctgccgtacaccgctgcgctgggcctgcccgagctgcgacgcgccatcgccgacttctaccatgaacgccatcatgtcgacatcgacccccgccgcatcgtcatcaccgcaggcgggtctgccgcactgttgctggccaccgcgctcaccgtcgaccccggcgacgaggtgatcgtcgctgacccgtcctacccgtgcaaccgcgaactgatccgctccttcgaaggcgtggtggtggacgtgccgaccagcgcggccacccgcttccatctcaacgccgaactggtcgaccgcgcgtggagcgagcgcaccaaggcggtgatggtcacgtcgccgtccaaccccaccggcacgaccatcgacttcgacgtgctcaaaggcgtgtgcgacctggcgcgattccgcggcgcgtggcgcatcatcgacgagacatacctcgacctcgccgaccgggagcccgacggcagcgaggtcaggtccgcgctgctcgccgacccggacgcgatcatctgcaacagcttctccaagttcttcggcatgaccggctggcgtctcggctgggcggtggtgcccgaatacacgatcgaggcggtcgacgatctggcgaccaactattatctatgcgcgcacacgcccacccagcatgctgcgcttgcctgcttcacgcccgaatcgttggcggtgtgcgaggaacgcagacaggagctgctcgcccgccgccgcatcgtcgtaagtggtctggagcgcatcggcctgccgctcgaagtggttccgaacggcgcgttctacgcgtatttcagcgtcgcgggaaccggtttggacgcgtggacgttctgcgagcgtgcgctggaagaggcgcatgtggcgctgactccgggacgggatttcggcccggcgaccgcggacacgcatgtgcggctgtcctacgcggcgtcgcgcgaggcgttgacggaggggctgtcccggctcggaaagttcgtcgcctcgctgcgatgattctccgataaccgcggccggccttgtgtggaacaccgcgctcatgctgcggccgcgccggtgatacagtgagatgctatggtgaatttgcgttcgcgcgtcactcgattgggcgtgcttgacatcggctccaacacgattcatatgctgatcgtcgacgctgcgcccggcgcgcgacccgatcccgaggccagcaccaaatccacggtgcggctgatgcagtatgtcaaggatgacgggtcgatcaagaagtccggcatcgaggcgattctgaccgccgtggatcagtgcatggaacttgccgaggaatacgacatcacgcaattgctcgcgatggccacgtcggccatcaaggaggctcccaacagcaacaagatcctgcgcaagattgaagagcgcatcggccagagtgtgaccgtgctgtcgggaacggacgaggcccgcctgacgttcctcgccgcccgacgcgttccccaaatccaagcatccggcgcatgccgtgggcacgtcaaagacgttccgctcattggcacgtctggcgggcgcggtgctgcgccagtccgggcgcgaggacacgtggatcatgacgcgcgagcagctggaggactggattccccggcttgcggccatcgagccggagcagcgcgtggcgttgccgggcatcacgccggagcgcacgatgcagatcgtcggcggcggcatcgtggccgacgagatcatgaggtccctgaacgtgcatgaggtcgagatctgcccgtgggcgttacgcgagggcgcgattctgcgctggctcgatcagttcggtcgcacgcggctgggtttctgaccgttgcggtttctgcgcgcagcgtctagatgccgcgccggtgacggggcatctactgctccaattgtgccagctgcgtgcgaatcttatgcagtttggcgtaaatctcgttgcgctgggcggggttcttggcacgctgatgatcacgcgacagcttctcttcggcggctttcagcgtgacgatctggtcccggcgggcgattcgcgcgtccagattggctccgtccgcggaatcgagaatcgcctgcgcgcacagcgaatcccacaggtcgtccatcgtcttcgcgccgccgtcggcgttcccttccggtagttccagcgtgacctcgccggcctccattcgccggagaacactttcgtgatcggcacatgaccggcacggaccggcacgttgcggcgcacggccagcgcacactcctcgcgtactgtgccttcgaactcgccttcgtgcacgcagacgaacacgatgccggatttacgctgtccggcgatcagatcgatcacctcgacggggatgccgggcgtgttcacgcgcaggccaatcaccagcacctcgggcatcttgccgctgccggcgcccatcgccgtgttcgcgggccgcagcagcgcgagcatcgtgatcgaggcgatgtcgttgaccagtcgctgcttgagtttggacgataccggcaccttcgccacgaacaatcccttcggcagcgtgcccttctgctcgggaatcgccgccgaggccggcagtcccagcgtcagggcggatacctcgccgcagtgtgcgacggtcaggtgtgcagcagtcatcatcggcctccttgtgttcgcctccggcggcaggcccgcctgtgcgcattgctccaatcctaaccccatccgggcgcccgccggggatgaccgtcacaaaacggccgtccgtgtgctccccgcgcgaaataccgttcctccgttacgctatgctgtgcatacatcgacgagtcgggcgacgtcgcggacgggtgccgctgacaggggagaaggacatggctttcacggatgaccagctggagagatattcgcggcatctgattctgaaggagatcggcgtacgcggacagaagaagctgctcgccgcgcgagtgctggtcatcggcgcgggcggtctgggatcgccggccgcgatgtatctggcggccgccggcgtcggcacgatcggcatcgtcgatgatgatgtggtggacctgtcgaacctgcaacgtcagatcattcacggcaccggcaacgtcggcatgccgaaggtcgaatcggcggccgaaaccgtcacctccatcaacccagacgtgacggtgaagccgtatcacatacgcgtatctgccggcaatatcgccgagctgattgccggctacgatgtcatcgtcgacgccgcggacaatttctcgacgaaattcctcatcaacgacgcctgcgttcttgccgggaagccgtatatatatggtggcgcgctgcggttcgagggccagctcatgacgtatgtgcccgggcgaggcccctgctaccgctgcattttccgcgatatgcccgcggccggtgaggtgcccagctgcaaggaggccggcgtgctcggcgcagtggtcggagtgatcggcagcatgcaagcggtggaggcggtgaagctgatactcggcgtcggcaagccgctgaccgcccggctgatgacgttcgacgcgctggcgatgacgtgccgtgccgtgccgttgccggagcgcgaacccgattgcccggtgtgcggcgagcatccgaccataaccacgctggatccggcgcgatacatccagccggcgtgcggcgtgtgaatgacggcgattccgccgtttaataacgcgccatcaccggcgtctatcaccacgctgcaacgggagacagacatctggcataggctcatgaacggataccgtgcgcctcggcggccaaaggcgcaaggcgcgcgcaggcgctggcatgagccacgaacatatgaggggagcatctgacatgacggacaagcgcatcgattcaccgctggcggacgacgacggcgatgccatcaagcgcatcacgccggaacgattcgctgagctcgacaaatccacggtgacgctgctggacctgcgcgagcccgacgaggtgttggtccatggccttgatggcgcgatcaatatcccgttcaaccagatcggcacgaggctgagccaggtgccgaacgacaagccggtcgtcgtgttctgccgggtgggggattggagcgagcaggtcaccgagatccttgccgatcgcggctatgacgccatcaaccttgacggcggattccaggcgtatcgggagtatctcgcctctctgccgcaacagcgggagaacgacgtcgacgatggtgatgcccggcccgaaaaacaggcgaagggaagcgccgcgacgctctccatcccgaccgcggcgcagcagatatccctgcgcggccctgagcatgagagcaagtcgacgggggccgccgactcggccgcctcgcacggcagcaatggagatacggacggcgcgcagcctcacgcggtattcgtcgacgccaaagggctcaagtgccccggtccgatcgtgaaggtcgccgacacgctgcgcccgctgccgatcggaacccgactggccgccgaggcgaccgaaggcgccttcctgtcagacatcgcggtgtggtgcgaacgcaccggcaaccatctcgtctcgctcgaacgcgacgaaaacggcgtgattcatgtcgtcatcgacaagaccgcgcacatgccggcccccggcgctccggccgccgcatgcccgtcgtcgccggccggtcgggcggtatcggccgagactcccgccaccgcaccgcagcagaccggcttcaacccggatggcggcgacgtccgccatgacaagaccttcgtcgtgttcagcggtgacctcgacaagaccatcgccgtgttcatcatggcgaacggcgccgccgcgatgggccgcaaggtcacgatcttcttcacgttctgggggctcaacatcctgcgcaagcccaagcgcgtgcgtgtcaggaagacgctcatcgagcgcatgttcggcatgatgatgccgcgcggcacgcgcaagctcggcctctcgcgcatgaacatgggcggcatcggcgcgaagatgatccgctggatcatgaaatccaagaacgtggaatcactcgaatcgctgatgaagcaggcgaccgatcacggcgtgcgactggtcgcatgccagatgtcgatggacatcatgggcatccatcaggaggagctcatcgacggggtggagctcggcggtgtctcaacgttcctcggctccggcgagaccagcgacatgagcctgttcgtctgacgggacgcggcgaggccggttgacagtcgccataggtgtgcggcgtagaatacggaaggcgaaggagacccgcatgacacgcaaactcattctcgatttggataccggcatcgacgacacactggcaatcgcgtatgcgctcgcaagcgaacaggccgatgacgtccggctgatcggcatcaccggcacctatggcaacgtcaccgtcgagaccggcatgcgcaacacgctcgccgtcaccgacctgcttgggcatcccgaagtgtcggtgtatcccggtctcgaccgcccgtcgaccgcaccggaaaacttccgctattcgccgtcggcaggaacgcggcgcatccacggcgacaacggcatcggcgacatgacgatccccgattcgcggcgctcgccggaaacgacggccgcggcggatttcatcatcgacgcggcgcacacgtacggcaaggacttggtcatcgtgcccaccggcgcgatgaccacgatcgccgaagtctgccgtcgtgagccgcgcatcggcgagctcgtcggttccatcacgttcatgggcggtgcgctgaccgtgccgggcaatgtgacacccggcgctgaagcgaacatcatgcaggacccggaggccgccgacgccatcctgcgcagcggcgtggaaaccacgatgatcggccttgacgtcacgcatcaggcggtgctcacgcggcgcgacatcgagcgatggcggcggctgggcaccgcggcgggtgatttcctggcgggcatgacggatttctacatcgacgcgtattcggcgacgcagcccgagctgaaggggtgcggcatgcacgatccgcttgccgtggccgcggcgctcgacccgacgctggtcaccacgctgggcatgaacctgcaggtcgacttggagggcgcgtatcgcggcaggaccatcggcgaccgcgctcacgaccggctcaccgactcgcacaagaccacgcaggtggccgtgcgcgtcgacatcgcgcgattcaagagccagttccttgaccggatcacggcgctggcctcccactgatcaccgcgagacgggcggctgctgatcgccgcgcggcgcttgaccattccccgccctcttcccgcgaaagtcccatgtacattggtcgtgatgggactttcgcgggatggcggcggagccgagccgaggcgagccgggtgaagggggcggtcagtgcaggatgtcgaccggcgtggtgttcttgttgcgctcgatgatcgcgcagatctgccccggggtctcctgcgacacgtaggcgccgccgcgaagcgtgtacgacacggtgctcggcgatacccccgccgccttcgccacgtctttcagcgttgccatgcgtcaccgtcccatccatcatcgtgagagatcatccatttccccggtggccggttggaatcatcatccccgctgcgctgccgccctcctcatgccgccttggcccgtcctgtcggcggcggtgctggaggtgacgcgcacggggatgtcatgcatgatgccggtcggtcactgttctgcacgcatgctatcgggcgtcactggaaggtctgtgacgacgatgtcgaaaaatggcgctctcaaaactcgcagagtgacggcacccttcaaaaccattggaaaataagggatttcaacaaccgtcactgtgcgtgtgcacacgcacagtgacggtaccctcgcacagtgacggtatattcccgaaatgtctcgtatggtatggatgcgcggggattgggatccgggcgatagactcgatagttattcaaggatgaccgaatcgttctgctcgggtcttccagtcgaatgggtgccccggatgcgattcgaacgcacgacacccgctttaggagagcggtgctctatcccctgagctaccggggcaacgaatgaccattatacatgtcgggcggatatgcgcgtatcgtgcgcagtgtgaagcccgcaggccgccgcgcatacgtgccggaatggggaatgattctcgggaacgatggcgtccgcggttccggggcgttatcgtatgagcttgtatgcgcgacggctggaagaatacatgtcgttgcgtaccggttgacggacgacaggggagtggcgaatggcaaacgcgcgaggatcatcacggaacgcctacggctcagcggctcggcggtccggcgcgtcgtccggcactgcgaaaaggcccgccgcgaaaacaagcgccccacgcggccgacgccaccgtctccttggcgtcttgtcggtcatattcgccgctctcgcattggtgtgcagcgtcctgcgcatgctccccgaggacctgcaggcgctgccgtacatccccgtgatcgtatccgcgacgccgtggttcgtgattctcgccgtgctcgcgctgatactgtcggtcatctcgcgccgctggatcgccatgctgatggcgctcgcctgcatcggcctccaggtgtggtggcagtggccgttcttcagcgcgtccacgaagctgccggcggccgtcgacgcggccatggcatcgacccgggcggacaccggcgacatgatcgcccgcgtgatgaccttcaacgtctacaaaggccatgcggacgcgaaggccatcgtcgacatcgtgcgggatcagcgcgtcgaagtgctcgcgttgcaggagacgacgaacgatttcgtcaagaagctcgacgaggcgggcatccacagctatctgccgtattcgcaggtttcgtcgtcggacggtgtctacggcaacggcatctggtccgcgaccgagctcaggcgtccggtcgatgacgaggtcgggtcgagcgcgtcgttcatgccgggcggcaccgtgacgttcggcggcggcaaggcccagctgcgattcgtctccgtgcataccaccgcgccgattcccggctactggagccggtggaagcgctcgttggacgagctggcatccatgcgctcgcgcgaaggttcgcgctacgtgttcatgggcgatttcaacgccacgaccgaccacacgccgttccgcaacatcctggggaaccggttctcggacgccgcgcggcagtcggggcacgggttcacgttcacctggccgtccaacaagctgccgctgccgcggttcgccggcatcgaccatatcgtgctggacaaggacatcatcgccggtcagatgcaggtcaagtcggtcgccggctcggatcacgccgcgctgctcgccaccatcgtcgtgcagtgacggcggtgacggccggctgattggggcggtaccttacggcgacgttgtcatgttgtggtaggcgtcgggtgatgacggatgccgcgtagtgcgactacggtgcgtggcactacggcggtgcgtcaccacgcatatggggacatagatggtctcggcacgccatcgttgcgtccataagtgctcgcccaaacgacggctgcgcgcacatatgggcgcaaacctcgtgttttccgtccataagttcgcgcggacttcgccgtggcgcgtgcgcttatggacgcaacgtcccgcgtagggtgccccgtcagtccaggttggattgggtgccggcggtgtcggcgctgttggtctgctcggcctgggcggcgtcgagcttggccttgacctcgttcagcaggctctgcgcacgcttggcaagcgcttcgccgatctcccactggcgcatggactggtcgaggttcaatccgccggcctccagcgcctgcacggcctggatgagcttgtcgcgggcctcctcgtacggcatctgcgcgatggcctcgcgctccttgtcggtcaggctggtcgccggctcgctcgccgccgatgcgttcttgctggtcatgatggtctccttctgtcgtgtatgcgtgtcgtattcgattggataacggtcatatatatatggttatgcggctgatatctgccccgcactctgctgccgtgcggcactccgctactgggcggtggcggtgatgacccccttgcgcagcgtcagcgtgagatggtctcccgcgctcacctttccggcgtcgtcgatgacgtgcccgtcggcgttctggacgacggcgtatccgcggtcgagcgtggattgcgggctgagcgcggtcaggctggcatgcagcttctccacggtcaggctggcgtcgtccacgatgcgcgtcaggccgatgtccatgcggcggcgcgcgtcgtcgacgaaccgttggtacggctccagcatggtcagcggctgcgtcaggctgggccggttcgcgtacccttcgaccagccgtatctcgttgccgacgcgcgcgtcgatgcgcatgcgcatgcggtcgatggcattgccgatcagctgccactgctcgtgcacgtcgggcacgaccttcttcgccgcgtcggtcggcgtcgaggcccgcaggtccgccgccaggtcgatcagcgtccagtcgtcctcatgcccgatggcggagacgatcggcgtctcgcatcccgccgtggcgcgcaccaccgcctcgtccgagaatccgatgaggtcctcgaacgagccgccgcctcgcgccacgatgatcacgtcgacgtccgggtcggcgtctagccggtgaatcgcctcgacgatggattgcgggcactgcggcccttgtacgaaggcatggacgatgttgaaccgcaccgtcggccagcgcagccgcacgttggtgatgacatcgccttcggcccgtgcgtgcggggcgcatatcagtccgatgcaggaggggaattccggcagcggcagcttgcggtccgcgtcgaacaggccctcgcccttgagcttcatgcgcaactggtcgatctgctccttcagtccgccgccggagccgatcttgcggatgtcgtcgccgatgaagctcaaccgcgtctgcttgacccagatgtcggccttgccatgcacgaccacgcggtcgccctgcttgaatgaggcggccttcgaggcgaacgcccgccagccggacacggatatggcgatgtcctccacgtcatcgcgcaccgtaagatacgccgagccggcgcggcgcgtgttgatctccgtgatctgcccggcgatccacgcggcgggccagcgctccaccgcggtatggaatttctggctcagtacgctgaccggccaggggttgtccgcggtggtctcggctgccaggcgcggcagttggtcgaagggcttggggatgcgctccccgccgccctccgacggccgctgcgtcgcgattgcaaggtcctgttcctgattcatgccttcaaggtttacgtacagaaaggacaagtttttctgcctgcgagagcgtcgccgtcggacggtatcattgttggccggcttttcggtgatggtctcgccgcgacacgctgacgacataccgtgaagtaaatcacacggatgttcttttcggctctatttcgccgaaatgtgcatatctaggattgttttcggcgtttccccactatatctaggggtggcatgtcgtatagtcatcagagaacaaacaacttacacacgtgtgatttcggctcggcgaccgccgcaagacatgccgggaatcacgaaaggacagggattaggacatggatgctctgctgatgaacgccagtaccgccacctcctccaaggtgctggtggagaagcgtgacggtcgcgtcgtcgacttcgacccgataaacatcatcagcgccgtgaagtccgccttcgccgaccttgacaagcaggtcggcccggaggaggagaagctgatccgcggcttcgccgaccagatcgaaggcgagatcacggagcgctacaacggccccgccaagatcgaggacatccagaacctcgtcgagcacgccctgatcgacgcccacctgtacgacgtggcccgcgcctacaccaactaccgtctcgacaaggacatccagcgcgccaaggccacggacgtcaacgaggccgtctcccgcttcatcaaccaggatccgacgctgatccacgagaacgcgaacaaggatgccaacgtctacgccactcagcgcgacctgctcgccggcgccgtctccaaggccgccgcgttcaacatgctgcccccggccgtcgcgaacgcgcacatgaagggcgacatccacttccacgacgccgactactcgccgttcaccgcgcagtccaactgctcgctgcccaacttctgggacatgctcgccaacggcttcacgctcggcaacgcgccgatggcctccccgaagtccatcgccatcgccgccacgcagatcacccagatcatgaaggacgtggcctccagccagtacggcggccagaccgccaaccgtgccgacgagcacctcgccgcctacgcgaagaaggactacgagaagttcctcgaagaagcccgcgagaccatccccgacggcatgccggtggagttcgcccgtcgtcaggtcgagaacgccaaggccaacgagcccgccaagctgcacttcggctcccgcgagccgctgcccatggacacgccgttccacaccgacgtcgacgagctggagcaggagcgtgagatcctcgccaaggtccgcacgcgcaagtccatctacgacgccatgcaaacgatggagtaccagatcaactccaaccgcgtctccaacggccagaccccgttcgtcaccgtcggcttcggcctgggcaccgactggttcgcccgcgaggtgcagcgcgcgatcctgctcaaccgcatccgcggcctcggcaaggaccaccacaccgcaatcttcccgaagctcgtgttcaccgtgcgccacggcgtgaacgccgaccctggcgacccgaactacgacctgaagcagctcgccctggaatgcgccaccaagcgcatgtacccggacgtcgtgttctacgagaacatcgtcaagatcaccggctccttcaaggcgccgatgggctgccgctccttcctgcagggctggatcaaccccgagaccggcaaggacgaggaggatggccgcatgaacctcggcgtcgtttccgtgaacgtgccgcgcatcgccatcgaatcccacggcagcaaggagcgtttctggaagctgttcaacgagcgcatggaggtcgcccaccaggcgctgcagttccgcatcatgcgctgcaagcaggccaccccggtcaacgcgcccaccctgttccgcttcggtgccttcggtcgcctcggcgcgagcggcaacgtcgacacgctgttcaagaacgagcgcgccaccgtgtcgctcggctacatcggcctggccgaggccaccgccgtcttctacggcaaggactggatccgcgaccacggctgggacccgcagggcaaggagttcgcgctgtcgatcgtcaagcgcatgagcgaactgtgcaagcagtggagcaaggccgaaggctaccattactccgtatactccacaccggccgaatccctcaccgaccgcttcaaccgcatggaccgcgagaagttcggccgcatcgagggcgtcaccgaccacgacttctacaccaactccttccactacccggtgtggctgcagcccaccccgatggagaagctcaactacgagaaggacttcccgtacttcgcgtccggcggcttcatcaactactgcgagtacccgtgcctgcaggacaacccgaaggcgctggaggccgtgtgggattacgcctacaacatcggcatcggctacctcggcaccaacacgccgatcgaccactgcttcgtgtgcggcttccagggcgacttcgagccgaccgacgagggcttcaagtgccccgagtgcggcaactgcgaccctgacaagtgcaacgtcaccaagcgcacctgcggctacctcggcaacccggtgcagcgcccgatggtgcatggccgtcacgaggagatctcccaccgcgtcaagcacatgagcggcgagaccggtcacgtgacgctggcggacggctccgagcgcgagtggttcgaagaggccaagtaactgccggtaccgcgcgttgtgctgtccgcgagggtcgccggtatatgttgtctgacacactcaaggccgttcggccgagcttacggtcagacaacatataccggcgaccctcgctcgttgcgcgcaatgttacggttggacagggaggatgatgatggacaggaagtcgacgctgcatgatttcgcggcgggcgagaccggccgcggacccggagtgccgtcatcactgaccaacaacccccgttccggccagtgggacgggcggcgcatgtccaagcgcatgatcgccgactacaagacctttatcgtcaccgatggcgaaggcgtgcgcaattcgctgtacgtctccggctgcccgttccactgcgtcgaatgcttcaactcgtcgatctgggatttccaggccggccacgaatacacgcagaagctcgaagacaagatcgtcgacgacctcaaggcgccgtggatccagggcatcacgttcctcggcggcgaacccatgctgaatacgcccgtcctgttgccgctcgcccggcgcatccgcggcgagttcggccacgacaaagacatctggtgctggaccggctacacgtgggaggagctgatgcgccccggtgagacgccggacaagctagaactgttgcagctcatcgacatcctcgtcgacggccgctacctcaaggaccagcacgactccctcctgcagttccgcggatccagaaaccagcgcatcctcgacgtgccgcgttcgctggccgccggcaggcctgtcgtctgggccaagctccacgaccaggagcgcgacatccccgaaatgtacctcaaggatcgcgaggccggcgagggcgcacaggcgtcgtgacggcgccgccggcctcgccatccatccagtggattcgatgccgtcggcctgatcgcggccatcctgacagtctcgcccgccatcggcatggccttgcttctccccgcattcatctggcctcgcgtgagtccgctgttccatgtgatgatgctctgtttccgggaagggtgatcgcgcatgctgggcaccggattggggcggacgactctgtatatgcgcggcgtgtctgtatatgcgcggcgtgcgggacggcgtggtcgacgttttcgcgggcagcggcgtgcccggtccgctggaggtctcggatactgcggccggggcatggcccgccgtcgtcaccatcatggccgccatatcagggatttgagcgggactggggcggtcaatagcactggtccataagaccaccatcctgctggcatgctcggctcaccccccgaatgcgcgataatgggggtaacgccgcaatcgtggggaaaccgtcgagtttccgttttgcgtttgttagcgaaatcacgccatacgacggctcgttaggaggggtctcggactacattacataaggaagtagcgggaagtcccgaaacgaagacagaggtaacagatggtggatacagcgaataccgcggccgaaagccacgatagtaagccgttgcgcgtgggtctggatatcggatcgaccacggtcaaggccgtggtgctcgatcagaccaatgcgctcaataacgtgctgttctccgactaccgacgtcaccacgccaacgtccgcgccacggtggctggactgctcaaggacatccatcagacgctcgtcgacctcggccgcggcgacgagcccattcgtctcgccatcaccgggtccggcggcctgacgctcgccgacaacctgcacgtgccgttcatccaggaggtcatcgccgagacccgcgcgatcgacgaggaatacccgcaggccgacgtcatcatcgagctcggcggcgaggacgccaagatcacgtacctgaagcccactcccgaacagcgcatgaacggttcgtgcgcgggcggcaccggcgcattcatcgaccagatggccacgctgctcgacaccgacgcctccggcctcaacgattacgccaaggactacaagaccctgtacccgatcgcgtcgcgttgcggcgtgttcgcgaagaccgacctgcagccgctgatcaacgacggcgccgccaagcccgatctggccgcgtcgatcttcaccgcggtggccacgcagaccatcgccggcctggcttccggacgcccgatccacggcacggtcatcttcctcggcggcccgctgttcttcatgtccgagctgcgcgaggcgttccaccgcgcgctcgccggcaaggtcgacgagttcatcgtgccgaccgacgcccacctgtacgtcgcatacggctccgcgctgatcgctggggagccggatggcatcgacgtcgacggcgtgcatttcgagccgcgcacctgtgacgacatcatcgccgccctcgacgacctgaagaacctgccggcgaacacgccgaccatgcccccgctgttctcctccgaccaggagcgcaaggcgttcaacgagcgccaccatcgcgaacacatccacatcggcacgctcgaaggcgcgaaaggcccgcacttcctcggtatcgacgcgggttcgaccaccatcaaggcgacgctcgtcaacgacgaccgcgagatcgtatggtccagctacgccaccaacgaaggcagcccgttgaccgccgccatcaacatcgtcaagaagatccagtccgagctgcccgaaggcgcgtggatcgcccgatcctgcgcgaccggctacggcgagggactgatcaccaccggcttgcacctggacgagggcgtggtcgagaccatggcgcactaccgcggcgccgaaatggtcagccccggcgtcaccgctgtcatcgacatcggtggccaggacatgaaatacctggccatcaccgacggcgtcatcgactcgatcgccgtcaacgaggcgtgctcgtccggttgcggctcgttcctgcagaccttcgcgcagtcgatgggtctgaccatccaggagttcacccaggcggccctcaactccgaccatccggtcgacctcggctcgcgctgcacggtgttcatgaactcgtccgtcaagcaggcacagaaggaaggcgcgtcgatggagaacatcgccgccggcctgtgctattcggtcgtgcgcaacgcgctgtacaaggtcatcaagctgcgtgactccggtgagctcggcgacaccgtcgtcgtgcagggcggcacgttcctcaatgacgccgtgctgcgcgccttcgagctgctcaccgagcgcgaggtgacccgcccgaacatcgccggtttgatgggcgcgttcggcgccgccctgaccgcacgcatgcattacgaggacgtggccgacgacgcgcacgaccacgacgccgaagtctccgcgggccagtccgccgatatggccggcagcgacgatgtcagcgcggagcaagaccacgaggtcgtcatcgacggcgtgcaccacacggcgtccaacatcctgtccggcgacgacctcgacaacatgtcgatgacctccgagcgcgacgtgtgcaagctgtgccagaaccactgcaagctcaccatcaccacgttcgccgacggctcgcgctacgttaccggcaaccgctgcgagcgcggcggcgacgcgaagaagaagcgctccgacaggccgaacctgtacgactacaagtacaagcgctgcttcgcctaccgcaggctcaccgacaagaaggccacccgcggcgagatcggcatcccgcgcgtgctcaacatgtacgagaactacccgttctggttcacgctgctcacctcgctcggcttcaaggtgatgatctccggccgcagctcgcacgagctgttcgagaccggcatcgaatcgatcgcctccgagaacatctgctacccggccaagctggtgcacggccacatcaagtggctgctgggcaagggcgtcaagaacatcttctacccgtgcgtgagctacgagaacaacctcgtgcccaacacggacaaccactacaactgcccggtcgtggccaactacccggtggtgatcggcgcgaacatgcccgaactgcgcgaggacggcatccgctacatgcacccgtacttcaacctcgccaaccacgagctcatggtcgaccgcatcgtcgaggagttcgcgtgggcgaacgtgagccgcgaggaggccgagaccgcggtcaaggccgcgtacgccgaggacaagatcttcaagaacgacgtgcaggaggaaggtttcaaggcgctcgcctacatgaaggagcacaactgccggggcatcgtgctcgccggacgcccgtaccacatcgaccccgaggtcaaccacggcatccccgagacgatctgcgcgctcggcatggtcgtgctctcggaggattcgatctgcgaactgcagccgggggagaacctgcatctgagcgactacctgtcagaaggcgaggaggacccgcgcaagaagaacgcgaacggcttccgccacgtcggcgaccgcaaggtgaccgtctcccgcatgccgctgcgcgtcaccaaccagtgggcctaccattcgcggctctacgcggcggcgcatttcgtggcatcctaccctggtctcgaactcgtgcagctcaactccttcggctgcggcctggacgccatcaccaccgatcaggtggccgagatcctcgccgacaaggccgacgtgtacacgctgctcaagatcgatgaggtgagcaacctcggagcggcgaagatccgcctgcgttcgctcaaggccgccgtcgaggagcgcgaggccaacaagcggcgtctggccgcacaggcccagtcccaatcccgccagcaggtgctgccgaacaagcaggaccagccggtcggccccagtgcggccgagcttgcggcgcagcgtcaggccaaggaggagctcgcggtcgccgaggtgcagctcaaggccgcccaggaccagctcgccgccgcgcaggccgccgtcgaggccgcggagaagcagaagaacgccgccgagcagccggccccgcattccacgggcttccgcaagaccggatccgaggcgcccacgcccggccgtcaggtcatgctcgacacggtgatgaagagcaacccgcagctcaccaaggccgtcaaggacgcctcccgccgcgcggcgcaggccgagtcgcggctcgtcgccacctcgccgaacggcaagtccgcgaggaaggccgccaagaaatccggccacaacaccgcgaccatgtcgaagtacgccaacaaggtgccgttcggcaagtcaatgaagaaggactacacgatcgtcggcccccagatgagcccgatccacatgtcgctggtcgagtcggtcatccgctccggcggatacaagttcgacatcctcaagaccgcgagccgcgaggacgtcgaactcggcctcaagtacgtcaacaatgacgcctgctacccggcgatcatggtcatcggccagctcgttgacgccatcgtcaagggcaagtacgatcccgaccatgtggcgctcgccatcacgcagaccggcggcatgtgccgcgcgacgaactacttcggcctgatccgcaaggcgctgatcgacgccggctacccgcaggtgccggtcatcgcgctgtccacgcagggcttcgaggacaacccgggcttcaaggccacgcccacgctgctgcaccgcgccatcaaggcgctggtcgccggcgacctgctgctcaaatgcctgatgcgcgtgcgcccgtacgaggtcgagaagggcagcgccgacaagctgtaccagatgtgggacaccatcgtgcgcgagaccatcgagcaccacggcttctccgataccgcgaagaagaagatcggcaagcattacctgccgtaccagacgctgctcaaggagatcgtcaaatcgttcgacgcactgccgctgcgcgacatccctcgcaaggtgcgcgtcggcgtcgtcggcgagatcctcgtcaagtaccatcccgacgcgaacaaccacgtggtcgacgtcatcgaatcgcaggattgcgaggccgtggtccccggcatcatggagttcatgaccacgcgtccgtacatcaccgactggaacgagaagaacctcggcatgggcggcaacaagaagctgtactcgctcatgcgctggggtctcgaccgttacctcaacccggtgcgcgcggccatagatctggcgcatggcaagttcagccaggacctgccgatgcccgagctggtcaagaaggcctccgaggtgacctcggtgggcgtgcaggccggcgaggggtggctgctgaccgccgagatcctggagctcatcgagtctggctgcccgaatgtgatctgcgcccagccgttcgcctgcctgcccaaccatgtgaccggccgcggcatgttcggcaagattcgccgtctgcacccggacgcgaacatcgtctccatcgactatgatcccggcgcctcacaggccaatcagctcaaccgcatcaagctgatgatcgccgcggcgaagaagaaccaccagaagctggccgcggccgactgacggatcagcctcggcccggcgatcagccgaccagggtcgccgcgtaggcgtacagcctcttccatggcagggtcgacacgtctatcttgtcggccttgctctgaaccctctcgcggtagcgttccgtgcgcagcgccgtcttcacattggctttcacatcggcgagcggcgccttgccctcgaccccgtccacggtccagtcgtgtgcgtcgtaaaactcctgcacctcggtctcgctcgggttcatgcccggtttcgtggcgtcgtcgacgtagtcgttcttcagcgcggtcatctcgtagtcgatgtatgaggcgatgtcgtattcgctgcgcccgtagatgacctgccccgcttcacgtttctgccggttgttcgcgttgagggtttccatgcgcttgacgatgccggtgtacgagtcgtcgtcgaccagcccgtacgagactgcgatcaggtacgccgcgtgacggaagcgcagtgtgtcgatagtctgtttcgtcagccattcgaccggcttctcgccgccgtatgaggcggtccagtcggcgtcctgggcgttgaggttgacgtcgtgtttctgcttgaaatagctgacggcggcggtgcgctgcgacgaccacgcctgggtgaattcggcctgcgtgatggtggtgtcgccgaaggagaatttcgggaaggcctgcgtcgcgttggcttgcgcgtcgtctgtctttgacgagtcggggctcgccgtgagcgaacggacgagaaagacggcgccgacgatggccgcaatcagcaggatggccgcgacgacgatgatcgcgcgggttctcgtattggttttcgtccccatcttcgcggcgtcacggccgctcccgtccgttgccttgctgggagagcctgatccgcattttcgtgactgcttcatgccgtcatgatacgcggcggacatgattgcggggtgtcgcccgcattgcgcaggaacgcccccacaatcatgtccgccggtcgtcgccttggattccggttattcctggaatacgtccggatgcttcggatcgccgggctcgtcggccaacaggccctccaatcccaggaactccttccagaattcgagcggctggccatacggcgccgattgcgcgccgcgcgcctgcaggttcgccttcgcctcgaacacgtcctcttcgcggatatcctcgaagtagctttccagccgctccctgttctccggcacgtagaacagggacgcgatgatctccgtcagccgctcggcgcgctcgatcggcagcgaatcccaatgccgcagctcgatgaagttcttcatacgcacgtcgttgaaatgcgtggagatgatgtggttgatctcgtacgggttgagctcgcggtcgggatacacctctccggcgttctcatagaacgccgggtgatgcagctccttgccgctcaggcccctggcctccggcgtatgcgtcagatcggcgaacatcagcggcgtggacagcacgtcgatggcgtactcctcccagccgaaccgcttgtcgaacagtccgggaatcacgttcgtgcgctgggggtcgagatagtcccacatgcgctggcgcagcaggggccacgggttcggcgcaccctcgaaatacggcgtattgcggaagtaccaggcgaggatcggcccgatgatggtgcccagacgcagcttgtcgatggaatcctgctcgtcgacgtagtcgatgctcacctgcgtggaggccgagcaccgcatcatgcacgggccgaactggcctacccgccccaggtagcgggtcatggcgtcgtaacggtccttcgggttgaccttgacgtcggcgaagcccgacttgggctggtagccgtaattgaccagacggaagcccagctcgtccagcacgggatcgatgtcacgccggaaggaacgatacagcgtcagcagttcctgcggcgtcttgaggatgcccagcgagcactccacctgaccgccgggctccagcgacacggcgatgctttcgcgcccgagtccgaccagatggccgttctcccagtactccttctccttgtcatagtacggcgcgatgcgcttgagcagcgtttcgacaccgttctcctcgtagtagctgacggcggtgtcgtcgccgttgtgcaccggaagatgttcgatctccacgccgaaaccgcccgtgccgcgtttggaacggccttcctcgaagaatcgcagcagactgtcgatgtgcttgggattcggcttggcgagcagatgcgcgtaactgattctcggtgtcgtcatggggcatatcgtacctgcagattccatcggccacagcggtgccgttatacaaagaatcgatagccggtttgcgtccgaatgctggacattgcgactgatttcccgggttccgttcagggggtacaagggtgacgttatgacagttaacgaaatgccgaatacgccatagccccattgccgtagcctatgggtaccgctatacttgtgaacttgtaaagtctctttacatattggtggtgtggcgagtctgtgaatgaccccggaagggggcatcgtcatggatgaccggatcgccgacatgtcccccccgcaacgaggaggggaacggagactctccaataacagtaaggacaacgatgaaacctcatgtaggatcacggatgatcgcagcagcggtcgctatggggacggcgttcgcgttgatcgcgccgtcttcggcgctcgcggccgatgcgacgccagcggcggcgtcgaccggaacgacatattacgtgtcatcgacgcatggcgatgacggcaacgccggcaccgatcagggccatccctggaagacgctggacaaggtcaacgccatcgcgaccgaccttaagccgggcgactccgtgctgctggagcgtggctccacgttccagggccagtatctgcacatcaaggacacgtcgggaaccgccgacgcgcccatcaccatcgccgattacggcgaagcctccgccaagccggtcatcgcggcgaacggcgtcaagggcagccggtggtaccagaactaccgtgcgtcggtcggcaaccaccagaacaagggcaccgtctcctcggccatcctgctcaaggacgtgtcgtacatcacggtgaagaacctggagatcaccaatgacgaccccgacgtctacgacccgatcgacacgtggaagtggaccgacacggccgattcggatggcaccaagctcgaccgctcggccgaccgcatggaccgcaccggcgtggccggcatcgcggagaacggcacaacgatgagccatgtcacgcttgagggcctgaacatccacgacgtggacggcaacatctacaacaagcacatggccaacggcggcatctacttcatggctcactacgcccgcgagaacaagaacgccgcggacaagacatggctgcagaaccacatctcgcgcttcgaccacatcaccatcaagaacaacatcgtcaaggacgtggaccgctggggcatcgccgtgggctacaccgcgtacctcaacttcatcgacgcggcgtggggcgacggcagcatcgacgacgacctgatcgccaagtacggccagaccaacgtgaccatcgagaacaactacgtcaagggtgcgggcggcgacgccatcaccctcatgtactgcgaccgtcctgtcatccagtacaacgtgggcgacagcgtctcgaagcacatgaacaacatcgactacccgcatgaccgcgagcacggcggcaggtacggcggctgggtcgcggcgggcatctggccctggcgctgcaaggacccgatcttccagtacaacgagatgtacaacaacctcaactccgaacacggcaacggcgacggccaggcgtgggacgccgattacggcgacggcacgctgtaccagtacaactactcgtacggcaactcgttcgcctcgctgatgatctgcaaccagtacgccatcaacacgacgttccgctacaacatctcgcagaacgaccgccgcggcgtgttcgacctgccgggcaacggtccgggcaaccacatctacaacaacaccgtctacatcggtaaggacagcgcggtgctgaccggccgatccaacagccaggcgaagttcgagaacaacatcttcatcaacgcggccgacaccaagaagaccgagacgtggaaccgcggcaaccagcacggcggccagacgtacgacaacaacatgtacgtcaattacgcgaacaggcccgcctccgattcccacgccgtcgaggtcgccgatgtggcgaccgtgctggccaatgccggacacgcgccgagcgcgccgaaggccaacggttcggtctatggccgttccggcagcgagttcgacggatacaagcccgttgacggctccccggccatcaatgccggcaaggtcatctccgacatgaacgactacgcggtcacgaacgacttcttcggcaacaccatcaagggaaccccggacctgggtgccgtcgaaagcaacgtgctctccgtctccggcaaggtcaacgcgtacgagaccgccacggtcggcggctccaaggtcgtctacgtgccgttcaccgcgaagaacccgaccacagtcaagcagcttcgcgcgggcctgacggtcggtgacggatcagtcgccaacgtgtaccgtggcggcaacaagctggcggccgacgcggcgatccaggccggcgacgtgctgcgcttcgaggtcgaaggcacttcgaacacgccgatcgaatacaccatcgctcagaagaacgcctggaactgggtcgactggttcaagaccgccacgggcgtggtctggaactcccagaagcagaatggcgccgacggtgactggacggacatcacgacgttctccaccgagtacccgatgtcgaagtacaacgagtactacggcgcaggactcaccggcaacctgtcggacctgccggcggtgggagctgaccgccccgggcgtcagggcctgttggtcgacgacccgggtgcggccggcggcaccgccatcgcgtggaaggccccgaaggccggcaccgtgaaggtcacactcggccgcgacaacgagccgcagcggcgcaacgccaacgcttcgggcacggtgacgctcgcactgaccaagaacggcgagacgctgtgcaccgcagacatctccaccgcgcagaccaagaacgacgacttcgtcaattgcctgaaatcggataagggcacggtgcaggtgaacgccggcgacgtgattcgcatcgcggcgaccgcggccagtggcgcggccgctccggacctgtacgcctcgccggtcgtcacctatcaggatgtggcacccgtcgagtcccagacagcgcagtacactgcctcctacgacgcggtgagcgccaaggtcggcaccaaggccaccgctacggtgaagttcacgaaggacggcgccgccgccaccccgaccggcgtcaagtcctacgcgctgaagaccgcggtcgacggcgtggccgtggacgccgcgaccggcgcggtcacctacacgcccggcgcaaatgcgtacggcaccaccaagaccgcgaccgtggtcgtcacctactcggatgacaccaccgacgaggcgaccgtcaccttcaacgtcgagaagtccaatgcgcagaagtacaacgtgctgtacccggccgtgtccggcggcgcgggcgtcgcgctcaagcgcacgcccaagttcacgctcaaggcggacagcgccgcggcgtccatccccgccggcaccaagttcgcgctcggcacgggcgccccgaccggcgcgtccgtgaacgccgccaccggtgaggtcacgctgaccagcacccaggccggcaccatcaccgtgccggtgacggtcaccttctccgacaccaacgagtccatcgaggcgacggccacgttcaccgtgaccgctccggcggcgctcggcacctccaagctggagaccggcaccgcggacggcgcgaacgtcatctatgtgccgttcaccgcgaagaccccgaccaccgtcgccgatctgctggccctggtgaccgccgagccggattcggccctcaaggccgtgtaccgtgacggcaccaagctggaggacgccgcggcagtaaaggccggcgacgtgctgcgcttctacgccgacggctccaccttcaccgccgactacacggtcgtgcagaagaacgcctggaactgggtcgacgacttcaagaccgactctcagggcccgatctggacgtcgcagcgtcaggtgtccggcaaatggcagacgattaccgatttcggttccgatgtgtacccgcagacgtactacgacaagtactacggcgtcggtgtggactatcagaacaagaaccttccgaccaaccgcagcgccattcacggcctgatcgccgacaatccgggtgattccgcggcgacggcgatggcctggaccgcgccgaaggccggttccgtgaaggtcacgctggacaaggtgaccggagcgcacgtcgagccgtacatccgtcagtcgaacagcaacggcaaggatgtggtcctgaagctgctgaagaacgacgaggtgatctgctccgcgacgatgaccaattccttcgcgacggcgaccgggttcaacgaatgcctggcatccgccaagggcacggtcaaggtcgcggtcggcgatgtgctgcgcttctcggtggatgccgcggccggcacctccaagtcgtcgatccacatcagcccggtcatcacctacacggatgccgatgagccttcgcccgagcctggcctgtcggagcagtatgctgcggcgtatccggcttcggttgcggcgaaggtgggcgagaaggccaccgccgcggtgtcgttcacgaagggcggcgccgccgcggatgccccggcgggcacgacgttcgcggtcgcgggtgacgggttcacggtcgccgcggacggtacggtgtcgttcacgccgacggacgcgcaggcgggcaagacggtgacggccacggtgacggtgacgtattcggacaagtcgacggatacggcgacggtgacgttcaaggtcgccgccaagaccgagccttcgcccgagcctggcctgtcggagcagtatgctgcggcgtatccggcttcggttgcggcgaaggtgggcgagaaggccaccgccgcggtgtcgttcacgaagggcggcgccgccgcggatgccccggcgggcacgacgttcgcggtcgcgggtgacgggttcacggtcgccgcggacggtacggtgtcgttcacgccgacggacgcgcaggcgggcaagacggtgacggccacggtgacggtgacgtattcggacaagtcgacggatacggcgacggtgacgttcaaggtcgccgccaagaccgagccttcgcccgagcctggcctgtcggagcagtatgctgcggcgtatccggcttcggttgcggcgaaggtgggcgagaaggccaccgccgcggtgtcgttcacgaagggcggcgccgccgcggatgccccggcgggcacgacgttcgcggtcgcgggtgacgggttcacggtcgccgcggacggtacggtgtcgttcacgccgacggacgcgcaggcgggcaagacggtgacggccacggtgacggtgacgtattcggacaagtcgacggatacggcgacggtgacgttcaaggtcgccgccaagaccgagcctgagcccaagcccgaaccgaccgatccgaaggccgacctgcgcaaggaggtcgaatccgcgtcgaagcttgacgagaaggactacaccgccgactcgtggaaggtgttcgccgcggcgctcgataacgccaaggccgtgctggaggacaaggacgccaccgaggcgcagatctccggcgcgctcacgacgctgaagtccgccactgccgcgctggccaaggccggcgacaccggcaagcccgacgatggcgacaagccttccgcgggcaagcccaacgacaagggcgacaagggcaacggtctgtccaagaccggcgccagcgtcgccgtcatcggcgttgccatgctgctgctcgcagccgccggcttcgtcacggtgaacgtcgttcgccgccgccggtaacggcatgacgggcacccgcccgtaacaagcaatcaggggtctcatggtcagccatgagacccctttgctatgcctgttagccgctctctcgctgtcgattaccctatattcccgcgaaagtcccatttgcggacgctggaatgggagtatcgacggatgggagcaattgttcaacacgccgattgttgtatatgcaactgttgtatatggtatgcattattatgttatgttgcctgaatgttcggaatgcgattttcgcatcgacagacatggtatggaggggtatggagcaacgtattctcagcattgaaatacgggcggtgagtaaggccgtcgaccgttatttgggcgaaagcatgccgctctccgccaaggggaccaccggcggcaacgcgcatatcatcatgttcctggcgcgcaatcgggatcgggagatctatcagcacaccatcgagcagaaattctgcatcacccgttccacggcatcccgcgtgctggcgctgatggagaagaacgggctgattgcccgtgaatccgtggcgcacgacgcacgatgtaagcgcattgtgctgacggataaagccgacgccatcgtcgccgatctcaaagcgaacggggagcgtgtggagcgtcttctggtcgacggtttcacgcaaacggagcaagatgcgctgcatgactacgtggagcgcatgcgtgccaacatcgagcgcgcacaacatgaatttgaacatcagacatcctcccagacgccgtcaacggcggctcccgaatactcggaagcggaggtcatcaacacgaaggaggagaacaagtgagcagcaccgaagaagcgattgcgcaagcgcgcaaagccgtggaaccggacaagccgaaacatgtcctgcgcacgctgggcaagtcgatccgcgagtacaagaaggccagtctgctggccccggcgctcgtggcggtcgaaggcatcctggagatcctgatcccgacgatcatggcctcgctgatcgacgagggcatcaccggcggcagcatgccgtccaccatcaagttcggagtgatcctgctgatctgtgcgatggtctcgctgggtgccggcttcctgtccggcaagttcgcggccatcgcgggcgcgggcttcgccaagaacctgcgccaggaccagttcaagaaggttcagggcttcagcttcaccaatatcgaccggttctccaccggctcgatcgtgacccgactgaccaccgacgtgacgaacctgcagaacgcctacatgatgattatccgtctgggcgtgcgtgccccgatcatggtgattgtggcctggatcttctcgttccgcatctccccgtccatctcgctggtgttcctggcctgcatcccgatcctggcgatcggcctgtgcggtctggccgtgctcgtgcaccccgtgttcgagcgcgtgttccacacttacgacgcgctcaacaacgtggtcgacgagaacctgcagggcatccgcgtggtgaaatcctacaaccgcgaatccttcgaggtgggcaagttcggccgcatctcccagcgcatcttcaaggacttcaccaaggccgagcgcatcatgagcttcaacagcccgctgatgatggtgtgcgtctacgcctcgatgatcctcatcgcatggatgggcgcgcagcagatcgtcgcctccggcaacaacgccgccgtgggcctgaccaccggcgacctgaccgcactggtcacctatgccatgcagatcctcatggccatgatgatgctgtcgatgatcttcatcatggtcattatctcccaggcctccgccgagcgtatctgtcaggtgctgcaggaggaaagcaccgtgactgatccggccagtccggtgactgacatggccgatgggtccatcgaattcgaccacgtcaccttccgctactccgacagttccgaaaagcccgtactcgacgacatcaacctgaagatccgctccggcatgaccatcggcatcgtcggcggcaccggttccgccaagtcgagcctcgtgcagctcgtgccgcgactgtacgacgtgagctccggctcgctcaaggtcggcggcgtggacgtgcgcgattacgatctggaagccctgcgcgaccaggtggccatggtactgcagaagaacgtgctgttctccggcaccatcgccgagaatctcaggtggggcaacccgaacgccaccgacgaggaggtccgccacgccgcgcagcttgcgcaggctgacggattcgtgcaggaattccccgacaagtacgacacctacatcgagcagggaggcaccaacgtctccggcggccagcgccagcgcctgtgcatcgcccgcgcgctgctgaagaagccgaagatcctcatcctcgacgattcgaccagcgccgtcgacaccaagactgacaagctgatccgcaacgcgttccacaacgagatccccgacaccacgaagatcatcatcgcccagcgtgtcgcctccgtcgaggaatccgacatgatcctcgtcatggacaacggccgcatcatggcgtccggcacgcacgacgagctgctcgccacctgcgatgaataccggtccatctacgagtcccagaccaagaaccaggcccgacccgaggagctggtcgccgcggagccggccggggcgcaatctgagaccgagaccaaggaaggagagacgcgatgagcaacgaccagagcttcaagaaccgcaaacccggcatgggcaaagccgaacctggcaccatcaagcgcatcttcagctacatcttccaatacaagtggcgcgtcgccgccatcgtgatctgcatcctgatcggcgccgccgcgcaggccggatccgcgctgttcctccagtccctcatcgacacgtacatcctgccgatggtgggggagacaaatcccgactgggcgccgctgctgcgcgccatctcgcttatgggctgcctgtacctggccggtatcgtggcgtcctgggcctggcagtggctgatcgtcaccgtcgaacagggcacgctcaagaagatccgcgacgacatgttcgcccaccagcagaagttgccgatccgctactttgacagccatgagcacggcgacatcatgagccactacaccaacgacaccgatacgctgcgtcaggcgatctcgcagtcgttcccgcagatgttctcctcgatcatctccgcgctggcggcgctgctgtccatgctgtggctctcgatcccgttcaccgcgttcgtgatcgtgttcaccgtgctgctctacttcatcgtgcgcaagatcgtgagccgttccggccgctacttcgtcaagcagcagatgtggatcggcgacgtgaacgccttcgtggaggagtccgtcaacggccagaaggtcatcaaggtcttcaaccacgaggacgccacgcagaagaccttcgacgagaagaacgaggagctgttcgaggcatccgccgaagcgaacacctggggcaacgtcaccatgccggtggtcggcaacatgggatacctgctctacatcctgctcgccatcatcggcgcagccgtttcgttgtccggcgtcaatgatctcggcctgaccggcgtcaagccgctcaccctcggcaccctcgtctcgctgctcaccctctcccgttcgttcatcaacccgatcggccaggtctcccagcagctgaccatggtgatgatggcgctcgccggcgcctcccgaatcttcaagctgatggacgagcccgtggagtccgacaacggcaccgtcacgctcgtcaacgtcgagctcggcgaggacggccgtaccatgcgggaggtcgaccacgagaccggccactgggcgtggaagcgcgaggaaggcgacgacggcacgaggtcgctcaaggccgccgagaaactgcacggatccgtgcgcgaagtggccgtcaaggccaaggagcaggcgattacctcgccggacggccgctacacgttgctgcgcggcgatgtgcgcttcaccgacgtgaccttcggctacaatcccgacaagccggtgttgcacgacatcacctggttcgccaagcccggtcagaagatcgcgctcgtcggtgccaccggtgccggcaagaccacggtgaccaacctcatcaaccggttctacgacatccagcagggccagatcctctacgacggtatctccgtggccggcatcaagaagccggatctgcgccgctcgctgggcatcgtgctgcaggacgtgaacctgttcaccggcaccgtgatggacaacatccgctacggccgactgaacgccaccgatgaggaatgcatcgaggccgcgcgactggtgaacgcggacggcttcatccgcatgctgcccaagggctaccagacggtgctcgaaggcgacggctccggcctgtcccagggccagcgccagctaatctccatcgcccgcgccgccgtggccgatccgcccgcgctgatcctcgacgaggccacgtcgtcgatcgacacccgcaccgaggaggtcgtgcaggccggcatggacaacctgatgaagggccgcacggtcttcgtcattgcccaccgcctgtccaccgtgcgcaactccgatgtgatcatggtgcttgaccacggcaacatcatcgaacgcggctcgcacgacgacctcatcgcgcaacgtggggagtactaccagctctataccggcgcggtggaactggagtagccaaggactgccttcggcagaccgtcatgtttcctcggcactgtcgtgcctcggcgtcgcctatggacagcccaccggacttcccgcttaacggctccgcagctagtggctgatattccagtcgctggcattatccgcgaaagtcccatccgaacatgtcggaatgggactttcgccgggtgggggaggagtggccttccctacccggcacgataattgggggtgtgcgccacgcctcagtttgccaggtagttggcgatcgcgccggcggcggcgtagcctttgcggtacatgagttccagtccctcgaaggacttgctcagcgtcgagagcccgcacaggtcatcgggcgcgaggatgagcacgcggccgtcgcgctcgtactccttggccaaggcaacctcgtcgttgtaggtggcgtatcggttcagcagtcgctcggcggcggccggataggaatgccgaaggattcgcgccggcgcgatgtcgcgcttctgctcgcgcagcacgtccttcggccttgtcagcaccagcacgatgcggtcatatccgtcgtcaatggccttctgcacggggaccggatcgacgatgccaccgtcgaaatacgggacgccgtcgatcacatacggctcgcaggccacgggcacggccgacgaagccttcatgatgttgaaatcatcgtaatgcacgtcggacttgtcgaagtacttcgcggaaccgtccaacgcattgcacgcgatcaccgtgaacccggtggggttcgccgcgaacgcctcataatccaccggatattcgccgtcgtgattgctcagcgtgctgtatacgtaatccagattcgcgaaattgtggtgcttgacatagctgtcgaagctggcgtattccttgcggaaggcgtattcggtgtagaacttgtggttgcggccgtgctggccggcgaggaacgacaccatgttggcgctgcctgcggagacgccatagcagtggtcgaacgtgatgccttcctcctggcatcggtccatcacgccggctccgaatatcgcgcggaagcctccgccgacatcgatcagcgccgtcctgtgcgagggtttcgattgtgcggatacatcactgcgctgtgtgtcggtgcgttgcgattcgaccgtctcggctgtacccgcgtcccgtgcgcccgtatccgcgtgtgccgtggccttgtgaccgttgtccgtcgccttcaccgtcatcgtcgtcccctttcgtagtgtcgtccaagtgtacgcccgttatgcggacaatcacggtgtctgccagggtcgcccgatctagctgtgcagcagttctcgtgacagcgcggcgatgcgttcgccgctatcggaattcgcgatctcgacgccgccgtccatctcctcgggagcaagcttccccaacgattccagaaccatgcccagatgccggaccgttccgcgattgccgtcgataatcgcggtcgtcgacggcagcagctcacggaagtagtcgcggtagaacacgaaatgcgtgcagccgagcaccaccgagtcgatggacggaaggtcatagccgtcaaaataccggtgcagggtgcgcatcaccaggtcatggtcgcaaagccttccgctttcgacgatttccaccagatcggggcatggctggggcgaaatcatgttgttcgccttgaaacggtccatcagtgcggcgaacttgtgctcgcgcagcgtcagcggcgtggccgcgacgatgacgtgctgcggcatgtgtcgtgcaggtgcgggcccgtctcccgcggcggtgtcgccccgatcgcaggcgaccttcagcgcaggctccatgccgatgatcggaatgtcgtaatggtcgcgcaacgcgttcaccgccgcggatgtggcggtgttgcaggcgatgaccaccgccttgaccccctgactcatgaacctctccatgatgtcgaagctcagccgacgcacctcctgcggggtcttcgtgccgtatggcgcgttcgcggaatccccgaaatacaggacccgctcgtgaggcatgtcctgcacgatctgtcgcaccaccgaaataccgcccaagccggaatcgaatacgccgatcggtgccgtcgaagtcatgtcccatcgcctttccaacgtctagcggccaagccttcctgccgggaggccgtgtcatcgaacgcccccatactatcgcacactgttatccggcgcatgcgttgcggccgcagcgcacgatgtcgtcgcacggccgcaagcgcagcagtcgtgcagccatgcatcggctgtgcagccatgcatcggacggccagcccattcgcgggctgggagtactctggcagtcatgagtatcccgaaaagcgtcaccaaggcgcatgcgaccggcaatgatttcatcgcgtatctggattccgacggccgtttcgagccgaccgccgatgaggtgcggcaattgtgcgacaggcatttcggcatcggcgccgacggcctgctcaggctcacgaaaccgcagtacgtcgccgatctgagcgaggcgcaggtcgcggcgtgcgatgacggagacgccgagtggttcatggactatcgcaacgccgacggatcgctcgcagagatgtgcggcaacggcacgagggcgatcacgctgttcgcccagcggtgcggcgtggcgtcgacgcaggtgagggagccgttccgcctgggaactcgcgccggcgtcaagacgctgcgcccgctcggcgacgtggcgccatacggcagggatgtgttccgcgtggacatgggctcatggcggcgcggcgaccttgacgccttcacggtgaccattcccggcacgccgggagccgcccgcggcacgttcgtggacatgggcaatccgcatgtggtctgcgtgatcgaagacgcgatgtccacgctgccaagggtcgaggatctggatcttgtgaccaagccggaggtctcaccggtgctggaatccgaccagaacgcggagttcgtgcgcgtcgacgagatcgacgctgccgcagggacgggagaggcgaccatgcgcgtcaatgagcgcggttgcggcgagacgctgtcctgcggcaccggtctgtgcgccaccgcgatcacgctgcgcgccaaaaccggcgtagatcactgggacatcaccgtgcggggaggcacggtgcgggtggacgtcaccgatgagaccgtcgcgctcaccggttcggccactctggtcgcggacgtgacgttgatctgatcgatcgaggctctcaaaactcgaagatacaaaaaaggaaccgccattttccaacaatggcggttccctatcttcgagttttgagagcctcgttttcgtatcaggcgaaaatcgccggcccatccacgacgataatcagcacgatcagcgcaatgatccagaccacgtccaccatcagatcgaaattcagccggtagtacttgcgcaggccgttggatttcgccggcatccgctgcacgctcaccgtagcgtgcgacagcgccatgaactggatcgtcgtggcgaacatcaggcccaggcaccacgggcacagggcgcggatcacgaacatcgattggatgaacagccagtaggcgtacgccaaggccgcgagcccgcccagccatgtgcaaagcgcgaaccagcgcggcacgacgaccttggacaggcctatcaccgcaatcgtgacgaacacggattcggcggcgatgccgaagaaggcgttcgggaagctcaatccggcgaatttgatgaactccgcctgccatgattccgccacggtcgagcaggagaccacggcattcacgtcgcagccgagcttgacgccgggattgcgagcgagctgcagcgtctccgccgacagcatgagggagacgaacaatgccgccgcggaggcggccaacatgaccagatacgtccagaccgcgccatgacgccagccggtgagcccggcgtcgacgctgatgtcagcctgtttgactgcatcgctgttgtgagtcatacatcatccttacgttcgaggagaccgtgatgagggtggctgacaacgcggcgatatcacggtggttcttgatttttcgcggggttatgacgcgccttgtgcaataaccgacagcacacagcttacgatggatacatgactcgtttagcacttgccgccgcgccgccgaagtcgggctgggacatccactgccatacggtgtattcggacgggacgcagaccccggcgtccctggtcgaactgagccgccatatcggcctgcacggggcctcgatcagcgaccatgacacgaccagcggatgggcggatgccgaggccgcggcgcgcgaggagggcatgcgcctgctgcgcggcacggagatcacggcgtgcgatgggccggtgtcggtgcacatgctcgcgtatcagtacaatcccaacgaccgtcatacgtcggacctgttcgcgcgcacacgtcaggcgaggctgaagcgaaccaaggccatggtggcgcgactgggcgaggattatccgatcagctggcagtccgtgctggagcaggtgcacgagggggagcggaccacgatcggacgtccgcacatcgccgatgcgctggtcgccgcgggcgtgtaccgcacgcggtccgaggcgttcgccgacgcggtgagcgccacatcgaagtattacatccccacgccctccccgaccacgcacgaggtgctcgccgccgtggccgcagccggcggcgtggtgatcatcgcgcatccgggcgcggtgaatcgcaacgtgacactgctgtccgacagccagatcgagacgctgatcgaagaggggcttgacgggctggaggtatggcatcgggacaatccgccgcagcagcgggaacggctgtatgccatcgcgcaggcgcatcagctgctggtcaccggcggatcggactggcatggcgccggcaagccgaaccatctgggcgagaacctgactgatgacgagaccgtggccgagatcgtgcggcgaggggcgattccgctggtctgccctggtctgacaccgaccatcgaccccggctgtagagaaaacacaaagccgggagcggccgcagggcgttcaaaccctccggtcgctcccggtcgtcactgcatatccggccgactcccgcctacgcacaaaggcgggagaggggagccatctgagcccggagttcggtcagagcgccccgaagcccacggcgtgcttggtctcagagccgatgagcgcgtatccgagcgcgttcgccggcacgatgatgcgacggcccttgtcgtccgtcagcttgatcggggttccggccgacagcgccgattcgatggcctcggtgacgctggccgcgtcctcctcggtgctgaaggtgacgggtcgcgccacattggcgatgcccaattcgatgtccatgtttgctcctctcgggatgatgcgctgttgaaggcgctgggtggatgatgtgtccgacgcccgtttgcgccacgggctttcagtcgcatgcacgcgtgccgatgaaagccattgtgcattgctcccatcgacgtgcgtgacggttttcgctgtaggctacttgccttgcgatgactgcagctcggactgggcgtcacgcatggcgcgttcctcacgttcgagcagcgggatgacgatggtcggggtgtcgcgcgccgccgacgcgccgtcctgtcggtccggcgttgccggcgtcgcttgggacggggcgtcttcgatatgggcggccggcgtcgcgttcggcgtgcggtcgtcggtatcgtccgtggcgcctgttgcgtctgcatcgcccgtgtcgtcgctgtccccgcggctcagcgtcatcgtttccgatgtcgtgcccgccgttgccgtgacatgttccgtctcagcgctgtaccgaattcccatggtctgcggatcgaactcaccggccgccttgatgtccgcggaaccggtgcggtcggtctcgtcggtgttgtcgttcgggtcggcgatgtcgtcgggcacacgcgctccggcctgtgtcgcggccgcgaccttgcgccggtcgtcgtcattgagcagcgtgccgacggtgatggtcgatggcggcttggacgactgggcacccgacgtcgtcgcgggcgcggtcttacgcgtgaatgcgccgagctggtgggccagccgctccacctgcgccttgaactggatgattttctgactatcggcccggttcaacgcatcgatgaactcgccgacctgctccatttgcagccacaggttcgcgcgcagcatgatcagatcgtccagacgagaacccatcatgcggccatacgccgcaagcaccgcattgcggtgatcttcgtcaatcttgccgaaaatccacgcgagatcgcgtgccggatcgttgacctgcatgttctgccagttcgtcaccgcggtgacggtcgcgccggaaaacagcacgtcgccatccgagaacccgccatgcaccgggcaggtgacgaacgaccacaggccctccgtctcgatgatccggccccagctcgacgtgatttccggcggcacatggcccgcctgccgcagccgcttgatccaggcggtcagctgggcgcgaatctgcccggtggagaataccggatacgattcggcctgcaggaaattcggccgcagccggtgaatggcgccgatggccgtgcccatcgccgcgcaatcatccaaagtaagcagatcgaggggtcttgcgacgccatcgttgtgcgccgccaccatcacggtcgcgccgccggtgagcgtgcttttctccctgccgtcaacgaatgcaagcaccgtatccagggcgaatccgagaccgcccggatccttggcacgctccagcgtcctggcggcctgcacgcgcccggtcaggcgcttgcggccgtcttcggtgtcgcatgcgtatatgtcatacatcctgcctgcggcatcctgcatcacggcctgatcgatgcccgcggcgtcgtcggtgtcgttggcccgttcgctgtctcgcacgccggccatgacgatgctgggcatcgccgccgaggcgagtgccgccaacataagcttgcttcgttgagtcacactcccacactaatacaatgtcgcgcctcgcgggaggcaattggccgtatgactcgcggaaaatcacggtttgcccactatgctggcagcgcatcggccgggcatgcgccacaatggaggatatgagtgcatcgagcgagacgattcttgaggggctggacgatgcgcagatgtcggccgttaccgcgttggacggcccggtgcgcatcatcgcgggggccggagcgggcaagacccgcacggtgacccgtcgcatcgcctatgcgtgcgcgcggggggattgggatgcccgcaaggtgctcgccgtgacgttctcggtgaaggcggccgcggagatgcgcgcgcggctgcagacgctgggggtcggcgacgacgtgaccgctgcgacgttccattctgcggcattgcagcagctgaggcgtgtgtgggacgacatcttcgagacgccgctgccgcacgtgacctccgaccagcgcgagaacgtggagagggcgatcagacgggtcaccaatgccgcggacatcgatgcgcagcaggtgcgtgacgtcagggcggagatcaactggacgaaggtgtcgctggtggcgcccgacgactatccgcgcgtgtgctcggcgacgcgccgtcagccgccggcggagctcgatccgcagcgtttcgccgacatcatcacggcgtacgagggggagaagacggtccgcggacagatcgatttcgatgacattctgctgctcgtgtgccatgtcatggatgattacgaggagttggccgcctcgatccgctcgtcgattggctggctgacggtcgacgagtatcaggacgtgtcgccgttgcagcatcggctgatgacactgtggctcggaaacaaccgcaacgtgtgcgtggtcggcgatccggcgcagacgatctactcgttcgccggggcgagcagctatgacctgctgcatttcgcggacgagttccgcccgctggccgccgacgtcactctgaacacggattaccgctcgacgccgcaggtggtgcggtatgcgaaccgggtgctggccgccgcgccagaacgggaacaatatctggtgctgcgttcggcgcgttcgggcgggccgcgcgtgggccacacatgctatgacaccgatgaggaggaggcgcggggcatcgccgcgcggatagcgcgtctggtcgccggcggtgtggatcccggcgattgcgcggtgctgacgcgcatcaacgcacagcagcccgcgatctgcaccgcgcttcgggccgagggattgcgataccgggtgaggcgtgactccggatggcagaactcggcgctcgcggatgatgcgcagagccgtctggccctgctggaggccaagggattgagtgctgcagcctcatcggtgaccgtttcgacgattcacgcgtccaagggtctggagttcccgtacgtgttcatcgtcggttgctcggaggggctgattccctacggcgcatcgattgcgggcgaggctttggaggaggagcggaggctgctgtatgtcggcgtcacccgcgccgaggacggattgcacatgtcgtacgcgcgggccaaggacgagggctcccgtcccaatcgccttcccagccgcttcctcagctgacccaaggcgcatgtcgcgtgcccccgctggcgggggcacgcttgtgtgtggtgacgttacttggcggaatcgttttcgtcgttttcgccgccgtcctcgccgagcagtttgctcagttcggcgtcccagtcgatggcgccgccatcgttctgcgcctcggctccgttcgcggcgtcctttgtgccgtccttcgcatcacctgcgacggaagctccgtcatccgttccggccctcgtaacgcctgaggccgtgtcccccgcggctccggagtcgacggtcttggcctcatcgggcaatgctggcagcagatcggggtgggaccaggcgccgtcgcgcccttcgacaccacgctccgcggtgatctgctcccagagggccgccgcctcgcgcatgcgcttggggcgcagctgcatgcccagcagcgactcgaaggtgcgttccgccgggccgcccaccgcgcgcttgcgcctcatcatctcacgaagctgctcgatatgcggaatgtgcgccatgccggcgcgccacgtcacgcaatccacccagccctcgacaagcgccatcagcgtctccagcgagaccagcgcctcacgctgctcgggcgtatcggggatgcccaccttggtcaggttcaccgcgccggagatcgactccggatccatcgcgcccgcatcgcgaagctgctcctccatcgcgtcgagatcgatggtgatgccacgcgcgtatttgccgatcagcgcctcgaatcgcggcatcagccacggcactcctgcgaacagacgggcgtgcgcgacttcgtgcagcgccaggaacgccgtcacctccgcgacggggatgtcgagcgacgtcgcgtattcctcgatgttctgcatgatcagtccgcccgcggggttcttgagcagcgcgatgccctggtcgaagctgccgttgacctcgtgcgacaggtctcccgcggcgtgccccagctgcatggcgaatgacgtgttgcccagcagcttgatgagctgcccgggatccttcatgccatcggggacgggaatcggcaccggtccggcgaacatgcccgcgatctcgccgttgaacgagttgccgagacgctcggagatcaccgaggcgagcgcgtcgttcatcgactgcgcgaccggcccggcgaatttcgcccacgattccagcgtgtcctcgacccagccggctcgtgtgagcatctgcgtctctcctgaggtcgggtcgaacgtgcaggccgtgtccagccacaggttggcctcgctgagcgcccgccgcgcgatgtcggccgactgcgcgctcaccgttccctgcgagccgtcggcgttcgccttctgcaatgcgatggacttggcgagtttcacgttgatcggcccggattccacggtctgcttcatgtctccgaacgtgttcagtccgccggcggtgaacgcctgcatgagcgattgcacttcctcgggcttggggagcttgccgatatcctggctcatcagttgctcgcggatctcgtcgggcagctgcgaaagctggttccatgccatttcgccctgcaccggtccgaagcaatcgatgaaccattgccgcatcgcgttctcatccatggtgtttcccgccttatgtgttaacgtcagttgattccatattatgggaggtatggcgaatatgcatgaaaacaaccatcttcacgcgcacagcgcactttcgcgcatccgcaactacctcggctcgcactcgctcaggtatttcgccggcgccatcgccgtgatactggcagtggtgacgatgatgctgccgtccgcgtatacggtagagggcccggggccgacgcaggatgtgctcggctcgtcgtcaggctccgatgtgatcagcatctccggcgctgaaacccacaaggattctggtaagctgctgctcgtcaccgtcaacgccgccggcgtgcccgggtatcccgtcaccaacgctcaggcgttggccgcatggcttgatccgaagcagaccgtgatgccgcaggaggtcgtgttcccggtcgggcagaccagcgaggagtacgccgaggaatcctcccaggagatggactcatcccagtcgtcggcgaccaatgccgcgctctcgtatcttaagggcaagggcatggacgtctccggcgtgaaggtgtcgatgcatgtcgacgacatcggcggcccgtccgcaggcatgatgtatgcgctgggcgtcatcgacaagctcaccgaagccgatgagaccggcggcaagaccatcgctggcaccggcacgatcgacgcgaagggcaaggtcggggccatcggcggcattcgactcaagatgctgggcgccctgcgtgacggcgcgacatggttcctcgctcccgagtcgaactgcaatgaggtggtagggcacgtgccgcagggcctgcgtgtcgtcaaggtgtcaacgctcgatgaggcgtatcaggctctggtggcgatcggtcaggggcacaccgacggattggccggctgcaccgcatcgtgagtcgcccatcccggcccgccggaacgcgtccggacgaggcacggaaccggcctgtccatgcggcagcgggacggccgggaatcggccatgagacggacgcgtccatcggcatgtcccgtatcaattgcgagaaaaacccaaaaaacatccggtttttcggagtgttaacgtcgctgttcccagcgttttggtaatgtgttcaccgtgaatgaaacggcatcacagaacggtgaagaatttggtttccagtccggcgacatcgtgcaggaatggttgtgggatgacgacgtcgatgactcggtgcgcgccaagatcgaggatctgaccggcgaggatctggtcgacgaggactatgattccgcagtcgacggagccattgtctggtggcgggacggtgatgacgaggacgagctgtccgacaccatcgtggacgcctattcggtcgtcggcgatgatggccctttctgggtgctgacccccaagcccggcaggaccggcgcggcgagttccagcacggtccagtccgccgccaagaccgccggcatgaacgcggccacaccgctcaccgtaagccccgactggaacggcatccggcttcgggcgttcggcaagggacgctgatccggcctgtccgccggcacgataccagcggacgatatcgacggcggcatcatgcatgccgccgcatctgacgtacggcatcagaggcatcatgcatgccgccgccgtcacagccaacatgcccggggcgcgaaccgccgcacatggaatgagccgtgcacgccgtgaagcgggccccgcgaatcagcgctgcgccacggattgcttgtcaatcagcgtgcaatgaatcttcgccggtattgaggcgtccaacggcggcaggggagcggtcgtctccggttcgtcatcgtccggctcccgaccctcgatcagcgataccaatttgcgcgtcgcccaataccccatctcataatgcggcagctccacggtcgtcagctgcggctccagcgtctcggcgaacacccggtggttgtccacaccgaccacggacacgtcccggccgacgaccaggccacgtctcgccgcgttctcgtacacgtaccatgcgcgggcgtcattgaagcagaagtacccgtcgggccgcctccgctcgaacaggtcggtcacggtctgcaacgcaggcccgttgttcggcacggcgaccaccagcgactcgtcgaacggcatgcccgcctccaacagtgcacggcgatacccctccagccgtccctgctgcgcgagcatcggctccgagcagccgatataggcgatgctcgcgcagcaggcgtcgatcagccgcttggtcgcgtcgtagccgatgagcgtttcatccggttcgatgctggcataccggccggtgcgatccgtggcgtcgacgagcaccagcggataatcgtgcaacggtttcggcacgtcggtgaaacggttcgacatcttcgcgtaaaggaacccgtccaccccatagcgtttcagcgtggcgatctccctcgcctcgtcgctgttgccgtcggtgttcacggtcagcagcatataccccaacttgctggccgcgtcctgcgcgccgaggatgattccgcccgcatagggcgtggcggcgatcccctcgctgatgaaacccaggatgcgcgtcttgctggtgcgcagcgagcgtgcaagcggattaggccggtagccgagccgcttggcggtggcgcgcacctgttcggcgatggcgggtttgacccggccctcgtcgcgatcgttcaataccaaggaaacggtagagaccgacacccccgttctctcggcgacctccttcatcgtcgtcataggaagaacggtacacgcaatctgcgggtttcgcaggattgttcacgctattgacatccgcctgccggtgtcatgcaatcgctcggtggcggtcatctggtggcggtcgcgggcacaggcagggcggcggttattcgtcgccggtcactcgcttttgccggagaggatggcgtcgacgatcttcggcttctcggtgagctgaccggtgaatccagggcggatgtccatgtgtagcacgaggctcgtgcggtagccctgctcggcgagcttcttggcggcctcgccggccactttgagcacctcgtccaggtcgccttccacgttggtgaacagcgcattggtctcctgcggcaggccggattcgcgaatcaccttgacggcctgcgccacatatggcgacacctcggagccgacgccgttcgcggagacctgtatagccgccacggtgttgagatacggcttgccggtttccaggtcgatcggcacttcctgcgtgacggcgttgcggtcgatggtcatatgaatgccccctgattggttggttgttgctgtgttggatggtctgtatatacggtatgttccggccggcgtcgccataagggatccgcctgccgcgtgcaggtcagcgccagtgccatgcgtggtccatcggcccggaaccgtggccgaggttcagctgcgcgccgagcgctccggtcagatagtccttggcatgacggatcgcgtcgggcagtgcctcgcctttggccagattcgaggcgatcgccgacgacagcgtgcatcctgtgccatgcgtgttcggattgtccacgcgcacgccgtgaatccatgtcgcgacgccatcggcatacagcaggtcgctcgcatcggccacgccatgcccgcccttgacgagcaccgcgcagccgtaatgctccgacacggtgcggccggcgtcctccatcgccgtatcgctcacgatacgcgtgctctcacggtcggtgtcctcagcccatttcgcagggtccagcgaggctccccggtgggcgatcaggtcaagcagcacctcggtttcggggatgttcggcgtgatcacctcggccagggggaacaggcgctcggtgagtgcagtgatggcgtcgtcatcaatgagcttggcgccggacgtggcgaccatcaccggatcgagcacgatatgacgtgcgtgatgggcctccagccggtccgctatcgtgcagatgagttccgccgacgataccatgccgatcttgaccgcggccggtggaatgtccgtgtacaccgcgtcgatctgtgcggcgaccatgtccggtgtgatattctgcacacccgtcacgcccatcgtgttctgtgcggtgatcgcggtgatcgcgctcatgccgaacaccccgttggcgagcatggtcttcagatcggcctgaatgcctgcgccgccggacgaatcactgccggcgatggtcagcaccggaggcagcgtggattgcgccgccgttgtgtcaagttgctctgtcatgccgttcattgtagccggatggtcttgaaattgcgctgtttctatggtgagatggagtcgttttgcaatcgctgaccatggatcggcgaccacggataaaggagagctgcggcgagatggcgaatgacgatatccttcggcgtgatggtgttctggcgcgtatcaccggcttcgatgaaggacgcaccgcatattatgcggtgatgccgaacggccacagcacgcagctgacgttccccagccaggagatcttcgacatcggcgacgtgctgctggtcggcaaggacttctatacgaaggtgccgccctcggtgtggccggtcaagccgcgtgtcggcgtaatccgccgtgcgctggaggactgcgtggtcatcgagacctcggatggtctggaattgctggaaggtgaatatccggtcgacatcgcgcccggaaacacggtggagttcaccgatctgttcggcatcgaacgggtgctgtggccgaccgcgatccggccgggggagtccgaccatgatgacgacatcaagcagtaccgcctcacgccgagcgccgatccgtcgctcacgttcgcggcgttcggtgggtatgagcgggtgatcgcccgcgcgaaggagctgatcgagacgcagctgggcaacagcgcccagatgcgggcgatcggcgcgaagcccatcaagggcgtgatcttcaccggcgcgccgggtaccggcaagacgcacctggcccgcatcatcgcgaacgtggctgacgcccagttctaccttgtctccggcccgacgatcgtcagcaagtacgtcggcgacagtgaggagacgctgcgcatgatcttcgccgcggcgcagtccgacaagcgtgcgatcatcttcttcgacgagatcgattcgatcgcctcctcgcgcgagaccgacacgaacggcgtcggcaagcgcctggtggcgcagctgctcacattgatggacggtttcgagtccaagggcaatgtggtggtggtcgccgcgacgaaccgcatagaggacgtggatccggccctgctgcgcccggggcgtttcgattggcagattccgttcccgatgccgagcgagcatgaccgtctgcgtatcctgcaggtgcaggccgcatcgctgtcatgcgagggcgagctgccgttgaccgacgtcgccgagcgcaccgagggctggagcggcgccgaagtgtgcgccatctggaccgaagccgcactggtggccgccaaggacaagcgtgccgcgatccgcgccggtgacctcatgaccgcattcgagcgcgtcgagcatcggcccgagttccgcgcacgccggcactaggtgcgagctcgattctcggctcctgcttgcggtaagggttggttcttgccctcgctggcggccgcaggccgtccttgattgcagggcccggagggctcccgcgtagcgggcgatggtgtggtcttgtgtttcgtcggttttgcatccgttctgccgtttgtccaccctccggtgctgcgtgccacctcccgccagcgggaggggatgggtcttgtctgctggtctgattgggatgtggagtcttttgttccaaagtgtgagacaagtcgaggattttgtgccacaccacgtcgaaaacgccggttttgcgcgtggtgtggcacaggaccttgctgcggaatcggttttaaccggttacatgcgctgtcgtggtacaagaggaatatcggcaatccttgaaaaatggccgattccgctgtccggtgcgaatcctcccgtatcgggcgtgtaccacaccacggtcaaaaacgtgtttttcgtcctggtgtggcagcgacttcgccgtcatggctgcacccgcacagcctcatccgcacagccgcacccgcataaccgtcaccgaccggcgggagagcgacgacctgatgcgctaccgatgcgcccgcaggaagtgcttgatgagtcgcaccaaggcgaatcccacgaatgagaatacggtgaataccagcatgaagtatccgatttgctccatgcagccccatgaaagctgccatccgccaatcgaggtgcagacgtcggccttcgcgcaaggaccgccttcgaacccgtggatcagagcgaacagcagcgggagtgagaccgctacgcatccgagagggaatttccaagtgcttttcctgaagcaggcagccgcgatattgatgataagcaatactggaggaacaaggaagttgatcatcagtgcagcggccatgaagccctcataatcgggctgaactatacaggccagaagcaggccgtaaaggacggctacgatcagcatgcaggcgaatcgtccgggattgccgcgtatccacgaaccggatttcgacagtatggaaaggctgttgttcgtcgtactcatggaatccctttctcgacattgagcaacgtatatccatgatacgggatggcgcccgtcagaggaagagccgcaaatacgaatgccccccgctagcggggggcattaccgatgaaggctggagcttactcgctggccttggagtagagcttgccgccctgggcgcggtacttttcacccatggcgtccataccggcaaggatctcctcggggctcaggacgttggcggacacgacggtgtcgtcggtgaccgggttcgccggggtctcgacgccctccgggatcttgccggtgacggcgtccgcgacgatctgctgctgggcggcctcgccgccgaacgccttgcggatgttctgcgagatggccatcgagcagaacttcgggccgcacatcgagcagaagtgcgccatcttggccggctcggcgggcagcgtgtcgtcgtggaaggcgatggcggtatccggatcgtagctcaggttgaactggtcgagccagcggaactcgaagcgggccttcgagatcgcgttgtcgcggtccatcgcgtgcgggtggtgcttggcgatgtcggcggcatggcaggcgatcttgtaggcgatcacgccctgcttgacgtcatccttgttcggcaggcccaggtgctccttgggcgtcacgtagcacagcatggcggtgccgtaacggccgatttcggtggcgccgatggcggaggtgatgtggtcgtagcccggcgcggtgtcggtcgtcagcggtcccagcgtgtagaacggggcgccgtggcacacggccttctccagctcgatgttcatgcgcaccgtgtcgaagggcacgtggcccggtccctcgatcatgacctgaacgtccttggcccaggcgcgctcggtgagctcgcccagggtcatcagctcgctcagctgggccgcgtcgttcgcgtcggccagcgagccggggcgcagaccatcgccgagcgagaatgccacatcgtacttggcgaagatgtcgcacagttcgtcgaagtgcgtgtacaggaagctctcctgatggtggcgcaggcaccagtcggccatgatggaaccaccacgggagacgatgccggtgacgcggttggcggtcagcggcacgtagcgcagcagcacgccggcgtggatggtcatgtagtccacgccctgctcgcactgctcgatcacggtgtcgcggaacagctcccaagacagcttggaggcgtcatcctcgaccttttcgagcgcctggtacatcggcacggtgccgatcggcacgggggagttgcgcaggatccactcgcgggtggtgtggatgtcgttgccggtcgacagatccatcacggtgtcggcgccccacttggtggcccaggtgagcttctccacttcttcatcgatggaggaggtgacggccgaattgcccatgttggcgttgagcttggtgaggaaggcggatccgatgatcatcggctcggcttcggggtggttgatgttgcagggcatcacggcgcggccggcggccagctcggagcgcacgagctccacgtcgcagttctcgcgggtggcgacgtactgcatctccggggtgatgatgccgtgacgggcgtaccacatctgggtcaccgggtggtccttggcgcgcatcggctggtgcgtgcgtccacgccattccttggtggcgcggccgcgcttgatggcgcgcttgccgtcgtcctgcaggttgcggcggcggccctcgtagtcctcgatgtcgccgcggtcgcggatccagtcgaggcgcaggggcttcaggccctccttcgggtcgcacttggggccttcggtgttgtagtcgtggaacggggcgttcgggcccaccccgggggtgtcggagagcttgatctcagtgtagggtacctcaaggtcgtaggagccgtactcgtaggagaacggcacagacttggtcttgcggatgtgcgccttgtcgcgctgcttggacccacgggcggcgatgtcgacgcgctgctgcttggcgagcttctgcgcgtccttggcgtccttggcgttggtgaacttcttttcggtggcctcggccccggcggcggcgctgccttcctgcgcggcctgcgtgtcggtggcgggggtgtgggtcacgatgcgcggggcgtatccgtggcgctcatctgcgcgcacggccttccagccggagaccatctcgcgggtggcggcctcggggtcttcggcgcccgcgatggcggagaccgcgaaccagccggcggccttcgtgccggccagcatggccatgtcagccgcggtcacgccgccgccgacgacgaccgggaactcgctggcggagcagatcgtgttgatctgcgcggcatccagggtcttgccggagccgtcgttgccgcccaccgaggcttccggcttggtggaggagacgtgcagaggtccggcgccgatgtagtcgatgcagccgtcgggcagctcattgatgagtcggaccagggactcggtctcagccgacagtcccacgatcgcttcgtcgcccagcagggcgcgggcctcgcgcggctccatatcgctctggccgatgtgcacgccgtcgaccttgatgcccttgcggcgggcctgccacaccacgtcggcgcggtcgtcgatcacgaaggccacggagtcggacttctcgttgtcctcgatgatctgcgcgatgtcgcgggccatctcggtcagctcagaggcgtcggcgcccttggctcgcaattgaatgaaggtggcgccgccatgcaaggcctgatcgatcacctcggtcagcggccggtccttgcagtcctgggggccgaccacgaagtacgcgctcaggtcgaacgaatcgcgcatggacgcgaatgggtattcattgctcatctgttgttcctttaattgtgttattggaagaatatgatgccggcgccactcatcgggagcaccgggaggggcggctatcgcatgtcgatcgcgcggtctgccacctcctcggcggtaacgttccacagcgcgtccagcagcgccacctggaacgaaccggggccgttgcttcgtttctcggctatttcgccggccgtgttgtacagcgatgtggcggcgagcgcggcgatcagcggctgcgcgacggcgagatacacggcggtgacgccgccgagcgagcatccggcgccggtgattttcgtcatcatggcgctgccacccgccagccggtacacgtgttcgccgtcggtcaccatgtccgtcgcaccggagacggccaccgccgccgtgccgttggcgccgtgcctcgccatgaaccgtgcgagccgctgcgccggtgcgatggcggattccacgtcgtcgacggattccacgccggcgggcttggatgcggtagcggtcgcggattcctcgttcagcccccacatggcgtcgagcgcgatgatctccgaggcgttgcctcggatcacggtcggcggatagcgcttgaatgactgcaatatggcggttctggtctctccaatgccggcggcgacggggtcaagcacccagggatggccggtgttgtggaacgccctcgccacttgcggcagcgcgtccttgtagaacggcagcagggtgccgacgttgatgtagtcggcgccgctgatcgtggcggtgtcgatgatgtcgtccggcaggaagctcatggccgccgcgccgccggcggcgagctgcgcgttggcgacaaggttgatggtgacgaaattggtgaaggactgtgccagcggcgtagtctcgcgtaccgtgcgcaccgcgtccgctatctgctcgtgcagtgatggctgtgtttgcggcgatatccgcgtgttcggcgattcctcgctcataatcattgctccctacgatggtcttgaccaacaggttcaaagggtcaggcgtgtggcctttctcaactcgcgtactgctgcgggttcccctgcattgtgcccttcaacgctatggcccaatatggacattgtgtcttgcgtttcttgaaggtacgtggtaatggcgccctttcgttgccggcatgcgttgcgttgcggtttttccggccctgtatgggggatacaggattggcgatggcgacacgccgtttttgttaatggcatttacatgaaatacaggtaatgagatatcattctcatgatcaccgtgtggatatcgcattggtgcgtatacactaacagcaacagagcggcgcggcaggcgctcgtggattcaatgaagaaggaacgtttatggcagttcgcagacttggtggccgcatcgtggctttcgccgccacagtggccttgtcaataccgttagggttgttaacaaattcagcgtgggcggtcgaggacgccacccgatccgactccaccacgcagatgagctccacgccggaggtggtctactccagcgccgtggattccaagcagaatcgcacctcggatttcgacgccaactggaagttcatgctgtccgattccgtgcaggcgcaggatccggcgttcgacgattcggcctggcagcaggtcgacctgccgcatgactacagcatcacgcagaagtactcgcagagtaatgaggccgaaagcgcataccttcccggcggcaccggctggtaccgcaagtccttcaccatcgaccgggacctcgccggcaagcgcatcgccatcaacttcgacggcgtgtacatgaacgccaccgtctggttcaacggcgtcaagctcggcacccatccgtacggctactcgccgttctccttcgacctgaccggcaacgccaagttcggtggggagaacaccatcgtcgtcaaggtcgagaacaggctgccgtccagccgctggtactccggctccggcatctaccgcgacgtcaccctcaccgtcaccgacggcgtgcacgtcggcaataacggcgtggccatcaagaccccgagcctcgccacccaaaacggcggcaacgtgacgatgaacctcaccaccaaggtcgccaacgacaccaaggccgcggcgaacatcaccctcaagcagaccgtgttccccaagggaggcaagaccgacgccgccatcggcaccgtcaccaccgcatccaagtccatcgcggccggtgccagcgcggacgtgacctccacgatcaccgccgcctcgcccaagctgtggagcatcaagaacccgaacctgtacaccgtgcgcaccgaagtgctcaacggcggcaaggtgctcgacacttacgacaccgaatacggcttccgctggaccggcttcgatgcgaccagcggtttctcgctcaacggcgagaaagtcaagctcaagggcgtctcaatgcatcatgaccagggatcgctcggtgcggtcgccaaccgccgcgccatcgagcgccaggtcgagattctccagaagatgggcgtcaactcgatccgcaccacgcacaaccccgcagccaaggcgctgattgacgtctgcaacgagaagggcgtcctcgtggtcgaagaggtcttcgacatgtggaaccggtcgaagaacggcaacaccgaggattacggcaagtggttcggccaggccatcgccggtgacaacgccgtcctgggtggcgacaaggacgagacctgggccaagttcgacctgaccagcaccatcaaccgtgacaggaacgccccgtccgtcatcatgtggtcgctcggcaacgagatgatggaaggcatcagcggcagcgtctcgggcttcccggctacctccgccaagctggtcgcatggacgaaggccgcggacagcacccgcccgatgacctacggcgacaacaagatcaaggccaactggaacgagtcgaacaccatgggcgacaacctgaccgccaacggcggcgtggtcggcaccaactactccgacggcgcgaactacgacaagatccgcacgacccacccctcatgggccatctacggttccgagacggcgtccgccatcaacagccgaggcatctacaaccgcaccaccggcggcgcccagtcaagcgacaagcagctgaccagctatgacaattccgcagtcggctggggtgccgtcgccagctccgcctggtacgacgtggtccagcgcgatttcgtcgccggcacatacgtgtggaccggcttcgactatctcggcgaacccaccccgtggaacggcaccggctccggcgccgtgggctcctggccgtcgccgaagaactcgtacttcggcatcgtcgacaccgcaggattcccgaaggacacctattacttctatcagagccagtggaacgacgacgtgcacacgctgcacatcctccccgcatggaacgagaacgtcgtcgccaagggctccggcaacaacgtgccggtcgtcgtctacaccgacgcggccaaggtcaagctgtacttcacaccgaagggcagcaccgaaaagcgactgatcggagagaagtccttcaccaagaagaccaccgcggccggatacacctatcaggtctacgagggcgccgacaaggactccaccgcccacaagaacatgtacctgacctggaacgtgccgtgggccgagggcaccatctccgccgaagcatacgacgagaacaacaggctgatccccgaggggtccaccgagggcaacgcgtcggtgaccaccaccggcaaggccgcgaagcttaaagccgatgccgaccgcaagacgatcaccgcggacggcaaggacctgtcgtacatcgaggtcgacgtgaccgacgccaacggccatatcgtccccgatgccgccaaccgcgtcaccttcgacgtcaagggcgccggcaaactggtcggcgtcgacaacggcagctcgccggatcacgactcctatcaggccgacaaccgcaaggcgttcagcggcaaggtgctcgccatcgtccagtccaccaaggaggcgggcgagatcaccgtcaccgccaaggccgacggtctgcaatcatccacagtgaagatcgccaccaccgccgtccccggcaccagcaccgagaagacggtccgcagcttctactactcgcgcaactactacgtcaagaccggcaacaagccgattttgccgagtgatgtcgaggtgcgctactccgacggcacgtcggaccgtcagaacgtcacatgggacgcagtcagcgacgaccagatcgccaaggccggttcgttcagcgtggccggcacggtcgccgggcagaagatctccgtgcgcgtgacgatgatcgacgagatcggtgcgctgctcaactattcggccagcacaccggtcggcacgcccgccgtgctgcctggctcgcgtccggccgtgctgcccgacggcaccgtgaccagcgcgaacttcgccgtcgactggaccaagcccgctgacaccgtgtacaacacggccggcaccgtcaaggtccccggcaccgccaccgtcttcggcaaggagttcaaggtcaccgcgacgatccgcgtgcagcggtcgcaggtcaccatcggcagcagcgtctccggcaatgcgctgcgcctgactcagaacatccccgccgacaagcagtccgacacgctggacgccatcaaggacggctccacgaccgtcgacgccaataccggcggcggcgcgaacccgtcagcatggaccaactgggcgtactcgaaggccggccacaacaccgccgagatcaccttcgagtacgcgaccgagcagcagctcggccagattgtcatgtacttcttccgcgacagcaacgcggtgaggttccccgacgccggcaagacgaagatccagatctccgcggacggcaagaactggacggatctcgctgccacggagaccatcgcggcccaggagtcgtccgaccgagtcaagccgtacacctatgacttcgctccggtgggagccacgttcgtcaaggtcacggtcaccaacgccgacaccacaacccccagcggcgtggtctgcgccggcctgaccgagatcgagctgaagaccgcgaccagcaagttcgtcacgaacacgtccgccgcgctctcgtcgctgacggtgaacggcacgaaggtctccgactccgtgctcgccgccggctcctacaacacgcccgcgatcatcgcggacgtcaaagccgagggcgaaggcaacgccagcgtcactgtgctgcccgcgcacgacaacgtgatccgcgtgatcaccgagtccgaggaccacgtcacgcgcaagaccttcactatcaacctgggcacggagcaggaattccccgcagactccgatgagcgcgactacccggccgccgacatgacggtcaccgcgggtagcgagcagacgtccggcaccgcgaccgaaggcccgaagaaattcgcggtcgacggcaacaccagcacgtactggcattccaactggacgcccaccaccgtgaacgacctgtggatcgccttcgagctccagaaacccaccaagctcgacgcgctgcgctacctgccgcgccccgcgggcagcaagaacggctccgtcaccgaatacaaggttcaggtcagcgatgacggcaccaactggaccgacgcgggctccggcatatggaccaccgattacggctggaagctcgccgagttcaatcagccggtgaccaccaagcacgtgcggctcaaggccgtccacacctatgcggattccggcaacgacaagttcatgtccgcctccgaaatccgcctgcgcaaggccgtcgacaccaccgacatcagcggcgcgaccgtgaccgtgcccgccaagctgaccgtcgaccgggtggacgccgaccatcccgccaccttcgccacgaaggacgtgacggtgacgttgggcgacgccacgctgcgctacggcgtggactacctgctcgactacgcgggcaacaccgccgtcggcaaggccacggtgaccgtgcgcggcatcgacaagtactccggcaccgtcgccaagacgttcaccatcgaactgaagaacgccccggcgccggaaccgacgctgacctcggtgagcgtcaagaccaagccttccaagctgacctacgtggtcggcgacgcgttcgacccggcaggactggtgctgcagctcaactatgacgacgacagcaccggcaccgtgacctggaacacgcagacggccggcgacttcacgttcaagcctgcgctcgacgcgaagctcaaggtcaccgacaagaccgtcaccgtcacctaccagggcaagtccgcggtcatcgacatcaccgtctcgcagcccgccccgaccgtcagcaagacggatctggacaaggccatcaaggcgatcgaggccaagaacccggattcgtccaagtacacggccgactcgtggaagaccttcgcggacgccatggcgcatgccaaggccgtcatcgcggatgattccgccacccagcaggacgtcgataaggcgctcaaggcgctgaccgacgcctacgccgggctgaccgagaagacgcccgaacccgcccccgtcagcaagtccgagctggacaagaagatcaaggcgatcgaggccgagaagctggacgggtcgaagtacacggccgagtcgtggaaggcgttcgagaccgccctggcgcatgccaaggccgtcatcggcaacgccaactccacgcagttcgacatcgacaacgcgctgtcgatgctcaacgacgcccgcgccgcgctcaaggagaagcccggccgcatcatcgccatcatcgatggcagcgcactgagcaagaccggcgcatccgtcgccatcatcgcctccgtcgcggccgcgatgctggcggtcggtgccggcgtcatggcgttgcgccgcaagcgctcctgacccccacgagactctcgcgagtctccccgggtgccccgtcgacgatcatgccggcggggcacccgcatatccgcaggttggatgctgccgaacaaggcggcaggctgtcaccgtctgccgttagactcgtgcgagcatactaagtccccaaaccgttcaaaccagaaggtgcattgtggctgtttctaaactcgatgaagtcgtatccctcgccaagcggcgcggattcgtgttccccgccggcgaaatctatggcggcacccgttccgcatgggattacggccccctcggcgtcgccctgaaagacaatatcaagcgcgaatggtggcgctccatggtcgtcacccgcggcgacgtggtgggcgtggacacatccatcatcctgccgccggccgtatgggtcgcttcgggtcacgtctcagtgttcaacgatccgctgatcgaatgcctcaagtgccacaagcgccagcgttccgacaagctggaggagtcctacgccgaaaagcacggcgacaagctgcccgagaacggtctcaaggacatcgtctgccccgagtgcggcacccgcggcgagtggaccgaaccgcgtgacttcaacatgatgctgcgcacccacctcgggccggtcgaggacgagaacagcctgcactacctgcgccccgagaccgcgcagggcatcttcgtcgacttcaagaacgtgatgacctcctcgcgttccaagccgccgttcggcatcgccaacatgggcaagtccttccgcaacgagatcacgcccggcaacttcatcttccgcacccgtgagttcgagcagatggagatggagttcttcgtggtgcccggcaccgacgaggaatggcaccagtactggatcgacacccgcacccgctggtacaccgacctgggcatcaaccccgagaacctgcgtcactacgagcacccgaaggagaagctctcccactactcgaagcgcacggtcgacatcgaatacaagttcggtttccagggctccgactggggtgagctcgaaggcatcgccaaccgcaccgactacgacctgagcgcgcattccaagcactccggcgaggatctgagctacttcaaccaggccaccggcgagaagttcgtgccgtacgccatcgagccggccgccggcctgacccgttccctgatggcgttcctcgttgacgcctacgacgtcgacgaggcgccgaacaccaagggcggcgtcgacaagcgcaccgtgctgcgtctcgacccgcgacttgctccggtcaaggccgccgtgctgccgctgagcaagaagcccgagctgcagtccatcgcccacgatctggccgccgacctgcgtcagcacgagtggatgatcgactacgacgaggccggtgccatcggccgccgttaccgtcgtgaggacgagattggaacgccgctgtgcatcaccgtcgatttcgacacgatcgacgaccaggccgtcaccatccgcgaacgtgacacgatgcagcaggagcgcgtcgcgctcgacaaggtcgccgactacgtggccgcccgcgtgtccgagaagcgcgtgcgctaccccgagggccccgtcagcatcaccggcaccaaggccgccgacggcggcaccgacgtcgccaaggagaccggcgtggacgagtccgccccggtcaaggtcgccgaggccggtggcctgtactgatcgatacccggcccgaccacaccgggccgggtgctgaacatcattcggacagcccccttttcaccaagggggctcttgtacattcaagacatgtatggcatgagccgtgccgattcgtgggggagagccgtgacagacaccgttgaacagaccatcgccgtcgacgcgcatgagaccgacgtgctcgacccgcgcaccgacgcaccggccgggaaggaaccggtcacgatggcaccagtcgatctcgggccgatccacgtgccgacgccggtggtgctctccccgatggcgggcgtcacgaactggccgttccgcgtgctgtgtgaggaatacggcccggacggcctgtacgtggccgagatgattacggcgcgcgcgttggtcgcccgcaatccgaaggcgctgcgcctgtgccggttcgcgccgagcgagcgcatccggtcgctgcagctgtatggcgtgaacccggccatcgtcgagcaggccgcgcgcatcgtcgtcgatgaggacatggccgaccatgtggacctgaacttcggctgcccggttcccaaggtcacccgtcgtggcggcgggtccgcgctgccgtggaagaccgacctgttccgcgagatcattcagcgcgtggtgaaggtgtgctcggcggcgaacatccccgttaccgccaagatccgcgtcggcatcgatcacagccatgagacgttcatggaagccggccacatcgcgcaggaggaggggtgcgcggccgtcacgctgcacgcccgcaccacggcggaatactatggcggccattcggactggagccgcataggcgaactggtcggcgcgctggacatcccggtgttcggcaacggcgacatctggggcgccgacgacgccctggagatggtccgcgagacgagatgcgccggggtcgccatcgggcgcggatgccagggccggccgtggctgttcgccgatatcaggaacgccttcgcgggcagcgacgagcgcgtcaaccctacgctgggggccgtatgcgacgtgatcatgcgccacgcccggctgctcgtcgagttctatgacggtgacgagcgcatggccgtgcacgacctgcgcaagcacatcgcctggtatctcaagggattccccgtcggagggacgacgcgcagggcgttcatggagtgcgagaacctcgccgacgtggagcgcgagacctcgcgtctcgatcccgccatcaccttccccgaacgggtgaaggacaagccgcgcggccgtgttcgctttgcaaaaaaagtgcatctgccgtacggttggctcgactctcgggtcaccacgcacgaggagcgcgagacgctgttcggcgacgatccgatggacgccggatactgagacggcatccgggtcatgggctgaatgcggccatggtgtgtcgttttgtgcaaatgagatggaaaaacgttgatacacgccgagaaaatagctttataatcaatggttctgcgatagagttatgcgtaaccgtgagtgacaggagacaatggtgagcgagattgcccagactgacaatttcaacgacaggaccaacatcaaagtcgtcggtgtcggtggagccggcggtaatgccgtcaaccgcatgatcgccgaaggcctgcagaacgtgcagttcgtggccatcaacaccgatgccaaggatttgctgcgctccgacgccgatgtgaagatctcgttgaatgacgcttcaagccgtggattgggtgccggcgccgatcccgagcggggcagcaaggccgcgcaggatcaccagtccgacatcgaggaggcgctcaagggtgccgacatggtcttcgtgacctgtggcgagggcggcggcaccggcaccggcgcgagccccatcgtcgcccgcgcggcgcatcagcagggggcgctgaccatcgccgtggtcacccggccgttcacgttcgagggaccgcagcgttccgcctccgccgatctgggcatcgagaacctgcgcaaggaggtcgacgccctgatcgtcatccccaacgaccggctgcttgagctgtccgaccgcacgatcggcatcgtcgacgccttcaagaccgccgattcggcgctgctcgccggtgtgcagggcatcaccgacctgatcacgatgaactcgtacatccatgtcgacttctccgacgtcaccgccatccttcgcggcgccggcaccgcgctgttcggcatcggctccgcgcggggcgaggaccgcgccacgcaggccgccgagatcgccatcagctcgccgctgctggaatccagcgtcgaaggggctcacggagccctcatcaacatcgccggcccgaccgacctcaagctgcaggaggcctctgcggccaccgagctggtgcgcaaggccatccaccccgaagcccagatcatctggggtctcgcgctcgacgacgcctacggcgacgaggtccgcgtcacggtcatcgcggccggtttcgacgccgattccaagaacaccaacgtaccctcgatgaagggcgccacgaccgccgcatccatcccggcttcccacaccacggaccccgtcacgccgacgcatgcgcacgaccagcagcagccggtcgcgccgagcatccccgtgcgcacgcagccgtccgcgaacacgcctatgaccaccaccaatccggcggcgcgtcaggtgccggatttcgcgctgcgcaagggcggccccgcgtcgatgccgatcgatgacgagacctccgagcacgatatcgtctcctccggtgacctgggcgacctcgatatccctgattttctgcgctgagccgaaaggaactgaacagtcatggctgggtttatgaagaacgcgatgcagtatctgggcatggcggatgttgccgaagacgacgagccgatggacatccaggatgaggatcccggattcgacgacgatcattcggtcactccggtgtcccaggctgcgccatcgtcgccgacatccgcgcccagtcgtgagtcgaatccgttccagggtcgcgtgagccgcatcaccacgattcatccgaagtcctacgaggacgcgcagctggtggggcgtgctatccgcgacggcgtgcccgtcgtgctcaacctgaccggtgtctccgaggccgtggcgtaccgcatcgtggacttttccgcgggcgtcgtcttcggcgtgcgcgggtccatcgagcgtgtcactccgcgcgtgttcctgctcagcccagcccaggtgaacatcaaggtggaggagccgcaggcgccgtcctcggcgcacgacctgttcgccgactgatctgccggcggtcgtccggattggcggctgtagacgattcgtcgtcatgacagcggcggcggtaatgcccagttgacgttcagctgacggcaatgaagctgtatgccgttttgataggctggaaggcatggtgttcacaatagtgcgtctggtgattgactggattatcgacgcttatatcacggtgctgttcgtccgtatgatcctggattgggtgtcggtgcttgcgccgcgttggtatcccaagggcgtcgtcgcatcgctgatcaatgtcgtctaccagctcaccgagccgccgttgcgctggctgcgacgctacatccggcccataccgatggggcctatagcgatggacgtcagcttcatcgtgctgtacaccgcacttgtcgccttgagaatattggtgtaaatcgcgccgtaatcacgcatacggcgagagttctttcagggttcgtgctagcatcggaaggtgataccaacacagcgaggcatcgtgcccaaagcgaggtgtaagttttatggctcttttgacgcctaaagatatacgggagcataccttccagaccgtgcgtttcaaggaaggctatgatgtcgacgaggttgacgattttctcgatcaggtgacggaaaccgtcgaggcgcttggcaagcaggccgttgcaagtggccaggcgacgcagtcccttcctcccgacgtcgccaagctcaactccaagatttccgagttgactgcgcaggtacagtcactgcagagcgaaaacgagcagctcaagtccgcggcgcccgtcgccagcaaggacgatcaggcggctcaggtggctgcggcgaaactcaccgaagccgaggagagcaaccgcgcgttgtcccagcagaacgagcagctcaaggatcaggtggatcgcctcagcggccagatcgaccagctgaccgcgcaggccgcccaggcctccggcaaggccgatgtcgccgcgcagctcgccgcggtgcagaacgagcgcgaccagtaccgcgtcagcgccagggacatgagcggacgtctgcaggaagcgcagcagcaggccgcctcctaccagcagcagctcaacgatgccaagaagcacctcgatgcgttgcagcagcaggccgcgcaggcctccgatctggctcgtcagctggaggagtccaagcagcgcgagaaccagctgcgcgagcaggtcgccaaggtcgagccgagcacggagaccggcagcctgcagaagatcgctggtgccgccgccgctgccagcagcgagcccgagcgcgccaccgccatgctgacgctggccatgcagctgcacgaccagtacgtcgacaagggcaaggccaaggcgaaggaaatcaccgaggccagccagaacaagtacaacgagctggtcaccaaggccaacgactactcgtcccgcacccgtaccgaggccgatgagtacaacaagcaggttcactccgatgccgacgcatactcggagcgcactcgttccgacgccgacgcctactcggtgaagacccgtcaggatgccgacacgtaccgcgagaacacgcagcagcaggccgacaactatgaggacgaggtgcgtcgtcgcgccggcgagtacgacagcaagacccgctccaacgccgatgagtatgcgcagcaggtgcgtgacaagctcaccacccagtccaaggtcatcgagggcaacattcagggcctcaagcagttcgaagccgaataccgtgcgcgtctgaccgagttcctcggccagctgtctcgtcaggtgtccgatacgaacaactacagccagatcggcaagcaggcggaatagtcgatgaaggatatccaaggacggctgcgtgttcgcgtagccgtctttgcatgtgtggcggccgtggcgctgggcatcgatcagctcaccaagatgtgggcgcagcaggcgttgggcgacgggcgtacagtgccgctgatcccgggcctgctttcgttgacgctggttcataatccgggtgcatcgctcggtctcggatcgggaagcacatggctgatttcgctgctcgccgtggtggcgtgcgtggtgatggcggtgctggcggcacgcacgatatcgatgcgctggacggtgatgttcgcgttcgcgttcgccggagcgttcggcaatctgatcgatcgcgtggcctatgcggacgggttcctcaatggcaaggtcgttgatttcctgaattatggttggtccgtgggcaatgtcgccgatatctatctggtgatggccggcatcggcgtcgtggtgctgattgtgctggatgtgccgttcagtcgcaaggacctcgatcggattgagcatctgggggaggatgccggtgacgtggcgcgtgacggggagtcagacggcacggcggacgaatcgcaggactcgtcagcgatggtgcaggatgcatcgtccggctcatcccggacggaggtgaccgtttcgagccgtcagcctgatgactcggagaggagcgcttcatgagccgtctcgttccggcgcccgacgcattggtggggtcacgattcgacgtggcggtttccaagatgctgggcatctcgcgtgccaaggcggcggatcttatcgaatccggccaagcccgcgtgctggatcgtgcgatcgccaagtcgggcacgctgctgtatggggagaccgtcgaattcgacatcgccgaagaacggcatgagccggaaccggtgtgtctcgacatggccatcgcgtatgaggatgacgatgtcgtcgtggtcgacaagcccgtgggcgtcgctgcacatgcttcagccggatggacaggccccaccgtattgggcagcctgctcaaacgcggcgtgcgcatcacctcatacggagctcccgggcggcagggcatcgtgtcgcggttggatgtgggcacgtccggcctgatgctggtgtgcaagtcagagctggcgtacaaggagatgcggcggcagttctccgagcatgaggtggtcaagacctatcatgcgatggtccagggcaacctcaaggaggacaaggccaccatcgaagcgcccatcggccgtgccaaggtgtcggacttccgcttctgcgtcacgccgtcgggcaagccggcggtcacgcattgggacgtgctggaccgattcggcgaggcgacgctggtttcggtgaatctcgaaaccggacgcacgcatcagattcgcgtgcatttctcttcgatcgggcatcctctggtcggagacccgatgtatggggccaatccggtgctggccggggagctcggcctggaccgtcagtggttgcatgcgatgaagctggagtttcgccacccccgcacccatctctggacgtcggtcgaatcccactacccggccgatcttgcccatgcactggaacttatgcgcgccaggcatgcctcaactggtctggaaaccgccgactagcgtacccaatcggcctgtcgcgtagcgctgtcatcctactgtcgcccccgctggcgggggggggctgtcgcgtagcgactgggggtggtccaatgccaattcgcgtccacgctgttcttacttatcgcgtttcttccatgcaacgacggaagtgaccacgccggccgccagcagcggtacgcaggccaacgccgcgacgccttcaaccagcagcaggatggcgtctgcgggattgtagacgccgcgattgagatacatataacatgcgattgcggccagtgccgatactgtgccggccgccagcagcgcaaagccgagcgtgcgcaaggcatcatgcgatgaggagcaagattgagccgatgccgcagtcggcatggtcggtgcggactgcacggtgatcggcggcgaatcctcatagtgtggctgatttgcggacgtcattgttcctcctggtggttcgttgccgcgaattgtctggcgacggcggatcatccttgatggcaatctatgcgacggagacactttttgtccagcggaacggacaatgtggtcgaaggctgccgagttatccacattttgggcgtgtcgcgccggattcgattcagctttcgcgagttacatgtggcattttcgcagtgtttactgatggtcgtcattcgctgccatacatgtccctcctgtacaatgaccgtgtcatgcatgatgagacaaggggatgagtatgtatacctcgttggacaggttccgcatcaagccgggcaaagaggatttggcccgcgaatggttccgatatctgaacgatcacttggccgaagcgaatgcgacgatgccggctgagggcgcgcatatcgagtcatggttcctgcacgaggaatcggacggactgtacggatacgtgtacgtgatctacgacgacaatgataaggctgtcgaagtgttcaaggagagtgagaatccgttggacatcaagcacaacgagtacatgaacgcctgcatcgactaccacgactacgccgagatgaagcctgccgtggcgctgggcgactactccgtattccggagatgattggtcgacggttcgtcgacgccgttgtgtttgcagactcgtttgtacaacttatgcatttcggtcaaatgcataagttgtacaaacgatttccctagagaccctacttgccttgctgcgtttcgctggaattccagcgttttcaggaatacccgtggcttgcggcaacgggtgtgtgcgctgtttcccgcgattatgcgggacaacgtccgcattatggcatttcgcgggcgttgtacacgcggtattgcactcgggtcggaaacgcatggagcaagttcttccgcctcgccgccggggcggaagaaccatatgcactgagacatgtcgcccgaggaataatgcagaggacgctccgccagcgcacaatcagttcttgtgcagtttggcgttgagctcaatccccgtcttccggtagcgggcctcaatgcggccgttgacggagttgcggatgaagaggatgttgtctttgccgctcagatcggcgcccttgacgacgtccagcggttcgccggcggcggctttggccttgtcccagacggtgatcttggtaccggcggtgacgtacaggcctgcttcgacgacgcagttgtcgccgagcgagatgccgatgccggcgttggcgccgagcagggagtgctcgccgatggagttgcggagcttgccgccgccggacagggtgcccatgatggaggcgccgccgccgatgtcggagccgttgccgacgacgacgccttgcgagacacggccttcgaccattgagacgcccaaagttcccgcgttgaagttgacgaagccggcgtgcatgacggtggtgccttcggacaggtgggcaccgagacgcacgcggtcggcgtcgccgatgcgcacgccggagggaaccacgtagtcgatcatgcgcgggaacttgtcgattgacagcacgttgacggtggcggcgggagcggcggccggaagcccggcggaggcggcgaaggagcgcgcggcgctggtggcggccgcttcgacgtcgagcttgcgggcgttgaagtcttcgaccgcgaacgggccgtaattggtccagaccacgttcgtgagcttggcgaagatgccgtcgaggttgagggtgttcggctgggcgaggcgcatggagagcaggtgcaggcgcaggtaggcgtcggccgcatccgcgatcgggtcgtcaagggagcttacggtgaacaccggctcgcggcgcacgccacgggcgtcggcctgcggctgcgccagcgccccgaactcgtggttggggcggttcgcgccttcgggcgcggcgccgagcgtcagttgcggataccagacgtcgagtgtgttcccggctgcatcgatgctggccagtccccagccccatgcggtgcgttcgttcgtcatgcttgtctccttggtggatgaacggtagatgcttctatattatgggcagatgggcacgtatgaggctgccgttccgaatcattgtggcgcggtttcgtcacgggagaaaatctagcggggcggctacgatgaaaagctatgagtgactacaggaccgaacgggagcagcgtgagcgccgccgccgcatcatcatgcgtgcggtgtgcatcgtcattgccgtggccatgctcggcagcctggtcattcccgcggtgtatgcgggtctttgacgcgatcattggcgtcctgccgtgacgcgaggtgcttgagatttcgcatatggtcggcagcgtcgtcacacaatcgattcgttcacaagttcaatgattatggtggtattcgatggcagaatttgatttttcacaggcaatcggcgaggcacggtcgaagtatgagtccattgcgaaggcgttggacatcgaacggctgaagtcgcagatcgcgacgttggagaccgaggccgctaagcctggtctgtgggacgatcctgagaacgcgcagaaggtgaccagccgcctgtccgcggctcaggcgcagctgaagcgcctgaacgaggcgaaccgtcgcatcgaggatgtcgagacgctggtggagctcgctcaggaggaggctgacgccgattctctgagcgaggctcagtccgagatcggctccatcgcccaggagctggatgacatggagatccagacgctgctggacggcgaatatgacgagcgttccgcggtcgtgacgatccgctccggcgcgggtggcgtggatgccgccgatttcgcccagatgctgttgcgcatgtacctgcgctactgcgagcgcaacgggttcaaggccaaggtgatggatacgtcgtacgccgaggaagcgggcatcaagtcggccacgttccaggtggatgcgccgtatgcgtatggccgcctgagcgtggagggcggcacgcaccgtctggtgcgcatcagcccgttcgacaaccagggccgtcgacagacgagtttcgccgccgtcgaggtggtgccgctcgtcgaggcgaccgatcacatcgacattccggacaccgatatccgcgtggatacgtactgctcgtccggccccggcggccagggcgtgaacaccacgtattccgcggtgcgcatcacccaccttcccaccggcatcgtggtgacgatgcaggacgagcgctcgcagatccagaaccgcgccgccgcgatggccgtgctgcagtcccgactgctggtgctgcgccacgaggaagaagcgaagaagaagaaggagctcgcgggcgacatcaaggccagctggggtgaccagatgcgttcgtacgtgcttcacccgtaccagatggtcaaggatctgcgcaccggttgcgagaccagccagacccaggccgtgttcgacggcgatatcgatgcgttcatcgaagccggtatccgctggcgtcacgagcagcgtcgccaggcggccgaagaggaagagtaaaccgtgacttggctcccggctccgggggcgagtgaggagacgatatggcactcatcgcattggatcatgtgagcaaggtgtatcccaagggtacgaggccggcgttggatgatgtcaacctcgacatcgaacgtggcgatttcgtgtttctggtcggtgcttccggttctggcaagacgacgctgctgagcctgctgctgcgcgaggaggaggccacggacggcgagattcgagtggccggcaatgatcttcgccgtctgacgaaccgtcaggtgccgcagtatcgtcgttccatcggattcgtgttccaggattacaagctgctggcgaacaagaccgtgtggcagaatgtggcgttcgcgcttgaggtgatcggcacgcgccggtccgccatcaagtcgctggtgccgcaggtgctgcagaccgtgggattgaccggtaaggagaacaactacccgcatgagctgtccggcggtgagcagcagcgtgtggccatcgcccgcgcgtatgtgaaccatccgcagatcctgctggccgatgagcccaccggaaacctcgatccgacaacgtcgctgggcatcatggaggtgctggacgccatcaaccgcaccggcacgacgatcgtgatggccacgcacaacgaggagatcgtcaactcgatgcgcaagcgcgtcatcgagctgcataccggcaagatcgtgcgcgacgaggcccagggctcgtatgattccgccgagttcttccccgacagcgatgtcgcgtccaaggcgcatgaggcgatcagcgggcagtcggatgattcgcgtttccgccctgattccggctcgttcgacgcacaggtcaccactatcgaggcccgtggcgaggagggtgcagtcgagggtatcgaagtggtcgccaaggcggtcagcggcaatatccggaacgaaggcatcgcccggttggcgagctccgtgcattcggggcgtaccggccgctacggtgaggcgttccagtcggtggaggacacgctgacctggggcaagggcctgtcgcttgagcagattgccgcgcaggaggagcagaaggcccgcgccgagcagggcggggatgaacactccgatgccgcggctcagtcgagcgaccgggcgacggctcggggtgatgcccggtccgcgcaaccggaggacgccgcccagccggaacggcacgagccgccggaaccgccgcattcggcggatgatgccgcaccgcatggtcagccggagacggagcatcctcaggatgaatccacatcccaaagcgaacaggccggttcggcggcagagccgggctcctcgtccgatgaggggggcgagacgaagccgaggcgcgcgcacaagctgccgccggcgccgccggcccaaccggggcatcgcgacaggcatgccggaaaggccggtagtgctgatgatgccgacggtgctcgcaacgaggaggacaatcgatgagaatgcgttttatcctgtctgaaacctggaccagcctgcggcgcaacgtgtccatgatcatctcggtcatgctcgtcacgttcatctccttcgtgttcatcggtgcgtccgtgctgatacaggcgcagatcaccaaggcgaagggcgactggtacgacaaggtcgaggtcgtggtgtggctgtgcccggacggcaccagccagtcggcgtcctgctcgaccggcaaggcgccgacccagcaggagatcgtggatcttgaggacgtgatcaacaacgagctcggcagtgacgtgtcaaagatcacgtacatgagccgcgaggagttcttcaagaacacgttcctcaagcagtacccgaacggcgtgtacgagggacgtaccctcaccgcctccgatatgcaggattcgctgcgtctcaagctcaaggacccgaccaaataccaggtggtgtcggaggtgctgaccgggcgcacgggcgtggaggcggttgtcgaccagcggcagatcttcgacccggtgttctcggtgttgaaccgggccaccgtggtcaccgtcgtgctggccggtgtcatggtggtcgtcgccatcatgctgaccgcgacgacgattcgcatgagcgccgcctcccggaagaacgagacagagatcatgcgtctggtgggtgcttcgaactggacgattcgattgccgttcatcctggagggcgtggtggcgtccctgctgggatcgttgctggcggtcggcgcgctgagcggcatcgtcaaggtgttcgtcaccgattggttggcgaccagcgtgcagtggatgccgttcatcacgcagacgacggtgtggctgaccgcccccgtgctggtggtgggggccatgctgctgtcggcggttgcgtccgcggtatcgctgcgacgctatctcaaggtgtgacttgccgccgcgtgacgtccgggatgcgcgaagtatgagatgaatcatttcgctgccggatgacacgcggcgcatttatccagtttaattcgttacaatacattcaaatacggcattaatggaagggcgacaacaatggtgaagatggcgaaacgtgggggtacgttcaccgctttggcgcttgccgccgcaatggccctgggggcgggatcagtggccgtggtcgccccgcccgagcaggccgctgcggttacggagtatgaataccagcagaaggtatcgaaccacaacagcctcaagaagcagctgaccggcgtcgattccaaacttgccgatctcatcatctcgttgaatgacctgaccgagaaccagattcccgccgcgcagaaggccgtacaggaggcccagcagaaggccgaacaggcgaagagcctcgcagaggcgactacggcgcggcttgaggcggcgaagaacgaccggacctcgcttgaggagaagatcaagcagaccggtgaggattacgatgacgccaaggatgcggtcgctcagctcgcgcgcgaaagcttccacggctcggacgcctccaccctgatggacgtggtgaccaatgccaccacgaccgaggacttcgtcaacaagatgcagtcggatgccgctgtcacgcgcagtgaggcgaatgccgccgacgccgcggccaccagcctcagcacgtcgatgaaccgcaaggaacgtctcacggccatcgaggacgagatcacccagctcaagggccaggcggacagccaggcggccagcgcgcagcaggccgctgaggatgcggcgtccaagcagagcgagctggaggccttgcgcaagaagagcgacgaggaacgcgcccagctggaagcgcagaagaagagcctgagcaccaaggaagcgcaggaggccgccgaactggtgtcgatgaaggccgagatcgattcgtggagcgtgcagaacaacaccggttcggcgaatgccggcactggcggacagcagcagatcaagcccggcgccggcagcgggtcgggcagcggccggttccggttccggctccagcaagcccggttccggcaagcccggctccggttccggcaagtggttccggttccggcaatggttccggttcgggcggatcccagcccggcggatcaggacaggccaacggcatgaactacacggtgcccggcaactgctatgagggcatgccggtgtgctacgggcacaggaccggtaacacggtgggcggcagcgcctacccgtggagccagtgcacgtggtatgcgtaccgtcgccgcgtgtactactaccatctgcccaccggctcatacatgggcaatgggcaggattgggcgaacaccggccgcagcctcggctatctggtcaaccgcacgccgcacgtcggcgccgcgatggtgttccgcgcaggccagctcggcgccaacagacgttacggccatgtggcggtcgtcgagcgtgtgaacagcgacggatccgtgctgatctccgagtgcggcgccagccttcagggcgtggcgcaatggcgcacgatttacaatgctggtaatttccaatacgtgcattactgagttccgggtggtgttttccgattcgtccggtcacggcccgtgcaagcgggtctggtctcatgatgtctgtgttgatgtgagtgattgaagaggaagaccatggcaaaggaacagggcactgtgctcatcgcacagaaccgcaaggcccggcatgattacctgatcgaggacaagtacgaggcgggactggtgctgaccgggaccgaggtcaagtcgctgcgcgaggggcgggcgtcgctcgccgaggcgttcgtctccattgaccgtcggggtgaaatgtggctggaaggtgccaatatccccgaatatctcaacggcacgtggaacaaccatgcgcccaagcgcaagcgcaagctgttgctgcatgcgcagcagatcgtcaaactgtcccgtcagatcgaggccaaggggtacaccatcgtgccgctcagcctgtatttcaaggatggtcgggcgaaggccgagatcgccctcgcacgaggcaagcgcgagttcgacaagcgccaggcgctgcgtgaggagcaggacaagcgcgaggcgctgcgtgccatgcgctacaagaacatgcgctcccggtgagagccgacggacggaaagcgctgtggacaggccgcaccggtgggtgagtgaggagccccatatcccgttcgatatcgacgtggtgtatgaggatgccggcatcatcgtcatcgacaagccgcatttcctcgcgacgaccccgcgcggcatgtggtatcggcagaccgcgctgattcggcttcgcgagatgttcgacgagccggacatcacgcccgcgcatcggctggaccggctcaccgccggcatcgtcgtgttcgtgagggatccagcgctgcggggcgcataccagatgatgttccagggccggaagatcagcaagacctacgaatgcctggctccgtgccggccgacgacacggccgcgatacggcaccgtcgagcggctggaccctcctgccgtgttcccgctgcgccgacgttcgcacatcaccaagctgcgtggcgtgctgcaggcgttcgaggagccgcaggccgtcaatgccgagacggtgatcgatctcgcggcggaaggatatccctcgatgggcgggcgcttatgccacgggaggaacggtctgcgcgcctacgagctgcacccgctcaccggcaagacccatcagctgcgcgtgcacatgaactcgatagggttgccgatccatggcgatgatttctatccgcgtatcgtcgaacgcgcctatgacgacttctccacgccgctggaactggtcgcgcggtcattgcgcttcaccgaccccgtcagcggggagccgcgcgaattcatctcccgcatacctctgggttggtgaagtttacttcactttttctgttggcgtattcgcgtcttggcggtaatatgaagttaacttcatgagaagtaagcttcatgttatggaaggaattgattgaagacaagagtgagagaactgcgaaaacaatcaaagctgacgcaacagcaattggccgacttggtccatgtttcaaacagaacgattatttccatcgaaaaggaacaatatagtccatcgctaatgttggcctaccgaattgcggaagtgttcggcgtgactgtcgaagaattgtgttgtctcaaagaaaacagggaattggaggataaggatcaggaagcgaattaacaatgtgaggagtctcgttacggcgatcgtggttctgattctgggaattgcctgcttgggtatcgctgccttccgcggtatggcaacaagatttcctatagccggaattgttccgcttgcctagagtgcgatcgatttcttcttcgcctttactcaatcaagtattgacagccaagccgaaaaggtcacggacgaacgcgataggtatattgcgatgaaaagcagcaggaaagccctgctgatcaccaattacgtaattggtgccggtgaattccagggacagcagatggtattccaggtcgttggggtctggcccctcatccacgaatccgaagcgagagagcaaatccatgcttggcttgttgcgcggatccacttgagtcagcacgagcggcgtgcgattggaacgccacgcatcatcacgaagtctcataatcaccgaggtgagcagcgtgtctccgagatgttgcccccgtaccttcagcgcggtggcgatgtacgaaatctggtagatgccttcgtgctccttggtggtttccacgccgacaccgtattcgcagaagccggccacttcatcatgcaggggaatgtccccggatacgacaagaagcgtgcgcataactccggtcggggtcttgcgcgcgcagagaccgcgtatatatctctgtggatccatcgcccattcggggtctcctggcttgcagcacaggaactgtctgagggctgtctgatggtctctggagcattcacgctcgatgacgagattcagattcatcgacggtgtcttcccgggtgtttgccctgcgtgacagatagtggcgagcgctgttggtcagcttcatccatttctcgtccactgcgttgcgcggcttgccgtcctcaggcggcgcgtatgccggaatcagtttcacaccggtgcctgatattggcggtgttccgccgtttcgtaatgtgtgggcaataagggactcgaacccctgacatccaccgtgtaaaggtggcgctctaaccaactgagctaattgcccgcagactcacactgtatcgtatagtctgtatcgggacgccggccgagtgtcgttgggtggaattccgccgtcggtcgaaccgtggcgatgctgtgcttgccggcgcatgatatatgccgtaatcgtgcgaaagacgtgtgaggatgccgttttgctgggccaaatgtgaagctgcgtctcaacactcacgtaaagtgtgcaagagaagtactatccgtaggaggtcgatacaccaatggcgcatcaagacggggcagataaaggcgcatcggggatcgctcgcgttgggaagcgcaaatggggatacgatcccgatcaggtggacgctttcctggatcgtgcacatgcgctctacgagagcgaggatgcccatctcacgcagcaggacatccagaacgtgtccttcgatctgagcaagggcgggtatgacatcacccaggttgatgcggcgctgtcccggctggagcaggccgtggtcgacaagcagacgacgcgggagattaccgagcacggtcgtgtggcgtggaaagcccagaccgaagagctgtaccgtcaggtatgtgagcacgccgaccgcggcacgggggagcgattcgcgcgcggacatgatcgccggccgtcgtacgaccgcaagcaggtcgaccgactgatcgaccagatcgtggacaaggccgccgcaggccttggcgtggacggcgtgagcgaacaggacgtgcgcaagctcgccgatctgaattccggtgccgtctccaacgtggtgttcacgcagcgcaagggcaagaacggctatgacgagcgtcaggtcgattattacctcaactcgtgcgtgcagttgctcagccgtctcgaatcgttcgcgcgcgtctccgattatgtcggtggcggtcacgaatccggcggcagccggcgttcgtccggtgcaaggatcgcctccgacgcgggtgtgacgccgttgttcggcgcggacaacgcctatgcacatgcgccgtcgccggcgcggcaggaagcggagcctcagtccttcgcgcccgcgaacgaatcgttccatgccctccatgaggcagaggaggcgctgttctcatcgcagacggccgacgagccgagcgtcgcggccgatgcgcagtccgttcctccctcgttcgctcccgccggcatgtccggtacggtcgtatccgcgcccgcctcagcgcttccgtccacgttctcggccggagcctccgccccggagccgcagtcgtcgttggcggcgctgtcccggcgcaccggcagaagcgtgagttcgagcaacgtgagcgcggatcatgccgcggctcctgccccggcgccggagattccgtctccggccatcccggcggcaccggcatcattcgccccttcgcacgccgcggtatccgatcagccggccgcagtcgccgagccccaggctcccgaacgcgttgccaagtccgtgaaggtttccgcggagccagttgcagccgcacccgccgttgctccctccgcgccggcccccatgccggtcttcgatcagcccgtggcctccgacgcccataccgatgccagtgtcgaggccctgccgtcgttcgcgccgtcctcgtcgccgtcggcgaacgttcccgttcatgccgtagacgatgccgcgcagacgcaatccgatgactctcacaagtcatcgtcggatgacctgttctccagcatgtacctcagcccggaaagcaagctcgatttcgacatccccgacctgtcgttccccacgctcaacacgggcgagttctatagcggactgagaggtttcggcaaggacaacgactgaccatttcgtcggcgcgggaagacagatacaccacagaagacataaagaagcattgcaatgagccagcataggaatacggttgtcattctcggatcgaccggttcgatcggcacgcaaggtctggatgtcatcagtcggcatccggagcggttcaccgtcaccggtctggccgccggaggcgcgcatgtgcggcttctggcacagcaggtcgcacgtcatcatgtgccgcaggtggccgtatatgacgaggccgccgttccggcgctgcatgaggcacttgaggaggtcggagctcggtacacgcagattcaggccgggccgcaggcggtcaacgccatcgccggttccggtgccgacctggtgttgaacggcatcacgggctcggtcggactcgaaccatccattgcggcgctgagggctggctctcagctggcgctcgccaacaaggaatcggtcgtcgcaggcggtcacctgcttttcggcgcgcaagtgcgcaatgaccagatcaatcccgtcgactcggagcattccgccatctggcagtcgctgcggtccggcacccacgccgaggtcagcagactggtcgtcacggcctcgggcggccccttccgcggctggaagcgcgccgacatgagcgacatcacccctgaacaggcactcaaccaccccacgtggcatatgggacccgtggtgaccatcaactcgtccaccctgatgaacaagggactggaggtcatcgaggcgagccgtctgttcgacgtggcgccggatcgcatcgtcgtgaccgtgcacccgcaatccatcgtgcactcgatggtggagttcgtggacggagcgaccgtctgccaggcgtccccgcctgacatgcggctgccgatcgccttgggcctgtcggcgcctgatcgtctgggtgacgtcgcggcggcgtgcgactggacgcatgccagcgagtggacgttcgagccactggacgacgaggcgttccccgccgtcgcgttggcgcgcgagtgcctacgcgcgtcggagaagcataccgccgtgctcaacgcagcgaacgagcaggccgtgcatgccttcctcgaccatcgactgccctatctgggcatcgtcgacacggtcaaggaggtcgtcgacgcgatggacggggagcttcgcggcaacccgctgttcgcatccgtggaggaaatgggtcaagtcgagcgtgaggcgcgccggcgagccgatgatttgataaacagtcagaagtgaatcattcgcgcgaccgcgcccggattgatggcatggcgcagccatgcgatcaatcagtcatgccccggcatggatgtggtgtcgcgcataatcgaacaggaaagaccaatcatcagcatgagcgcgttgccgcaaaccagtgcacagacgtccgcgaccacaggaacggcgtcggccgtgacaggatcgttccgcaagaccggagagccggatatcagcgagagcccgttgcatccgcgccgcaaatcgcgtcgcatcatggtcgggccggtgccggtcggcggcggcgcccccatctccgtgcagtcgatgaccaacacgctcaccgcgaacgtgccggccacgctgcagcagatcgccgagctcaccgccgcaggctgcgacatcgtgcgcgtagcggtgcccagccaggatgacgccgacgccttgccgcagatcgtcgccaaatcgccgattccaatcatcgccgacatccacttccagtcgaagtacgtgttccaggccatcgacgccggctgcgcggccgtgcgcgtgaaccccggcaacatccgcaaattcgaccaggtcggccccgacatctgcaaggccgccaccgacgcgggcgtcagcctgcgcatcggagtcaacgccggatcgctcgacaaggagctgtacgccaagtacggcggtcccacgcccgaggcgctcgtcgcctccgcgctcaaggaagcccacatgttcgaggacgtcggcttccgtgatttcaagatatccgtcaaacaccacgacgtgattacgatggtgcagacctaccggctgctcgcatccaagggcgattggccgctgcatctgggagtcaccgaggcggggccggcatggcagggcaccatcaagtcatgcctcgcgttcggcgcgctgctggccgaaggcatcggcgacacgatccgcgtgtccctgtccgcaccgcccgtcgaggaggtcaaggtcggctgcaagctgctggagtacatgggactgcgcaagcgcaagttcgacatcatctcatgcccgagctgcggtcgcgcccaggtcgatgtcatccagctggcgaacgcggtcaccgagggactcaagaacgtcaccgcgcccattcgcgtcgccgtgatgggatgcatcgtcaacgggccgggagaagcccgcgaggccgatctcggcgtggcttcgggcaacggcaaaggacagatcttcatcaagggcaaggtcatcgagaccgtgccggaagaccagatcgtcgagacgctgctcgcgcgggccaacgacatcgccgcccagatggaggccgacggacaggtgccggtaggcgccaccggccctgtcgtcatccccatccagcatccgaacgcgatgaacgccgttcgctgaggtttttcatcggcgtccggccgccgtcgccgccggcatccggccggacggcctgagcgcggccggatgtcgtcagctcacagcgcagaagaccggcggattggctagtatggttgcgtgttgaatcggcagcgtaacaggtttcgtatccgccgcggcgaacgtcccgcagacgggaagtcgcgcgtatccgacgaatcggccgcatcgcggcggcaaccgggcgacaaggcgtcgccggccgcctggacgcgatggcgccgtctgatgtgcaccgtgccgattttcatcatcctcatcggcctgctggtgttcgtctccaatgcgacggccatgccgtggaacaatgagcccacagggcagactttgtcgacactgtccgccgataccggcgtgacgttcgacaacctgggcggcgttcacctcgccaagcgcggcgagtacgaggtgagcgagcggtctgtatggttcgacgcgaagagaccatctacgggcgagatccaacgcacgcatgtcatcatccgcgagcctgtcggcgtctccgggaagctgcccggcatggtgttcatgcacggcgcgggctacggttccgccgtcgattcgttcgtcgacatggcctatgacctgtcgtccgcgggattcgtcaccgccgtgctcgacaagccggtatggtccacgaatgacataacgcgcgattatacgggctcggcggccgtctatgacgaagtgatccgcatgttgcgcggcctcgacaacgtggatgacagggaggtcggcatctacgcgacctcggaatcgacatgggtgtcgtcatatctgctggacatggacaaggacatcgcgttccaggtgctgctcagcccgatggtgttcacgccgcgacaggcgatagggttcctcgccgcacaggatttcgcgctggtcggagcccatgacggataccagtcgatagtccggcgcgtgttcaacatcgattccgcgctgttcggcgtcacgcttcccgacgtccatacgctcaagccgagcgcgtattcgattccgacgctggtagcgtatggatcgaaggacgtgatgaccgcccaggtggagggcgtggaggcgatcgtggacatggccctgcgcacgggcaaccatgacgtgagcatccgcggctatcccgtggccaatcatgtgctccggttgggcgacgaatccgaaaccgggacgccgttcgcggaccagtacgccgctgacgtggtggattgggcggtcggcacggcgaagggcctgcgccagacgagcgagcgcgtgggaggcgtgaacctgtatcagtcgatagcagtgccgaaagacctgaaggcgaatcgcggcctgacggtgtacgggctgctgctgcacgtgttcatggtgttcatgatggtgctttcgctggtcatcgccgtggtcgcgctggtggtgaagatacgcgcgatgatccgtcgcaccggtccggcgctggggttctcgcatggtttcggcaaccagctgctcactctgacggtcactaccgtggccacgctggccctgttcggcgccggtctcggacaggtcatcatgggtgtggtgaagattgcctggggcggtgccccgccagagaagcccggactcatgtattggagctggccggtcatccaggtggtgtgcacagtggtggtgtgggcgtggtcccgcgtgttggcccgtctgatcgaagtggcgtcgctgcgcggtgtcatccggttccctccgcgcaagggcgcgatcggggatgtgatgacaggccgtgatccggtgctcgcctcgaccagacttggacgcgtgctgttctgggtgacggccgtcaccatgctgtcggttctgctgatgttcgcgttctggggattgttcgtctactgacggcgtccgccgcagcgaacggtggcggaaccaatggatacgcgaggaacgggaggaagcgcttatgccgctgtatcgtgacgaaggcgtcgtgttgcgtacggccaaactcggtgaagccgaccgcatcgtcaccttgctgacccgcagccatggcaagatccgagccgtggcgaagggcgtgcgccgtgtgaaatcacggttcggcgggcggctggagccgttcatgcgagttgacgtgctcatcgccactgggcggaccctggacgtggtgtcgcaggccgagtccatttcggcgtatgcggctcagatctgcgccgattacggggcgtacggcatcgccaatgtcatggtggagaccgccgacaagctggtgtccgccgaaggggagcgggccgtcgcgcagtaccgtctgctggtcggcgggctgaacgcgctggcgcgtcacgcgcatccggcggcggcgatcggggaatcctatgtgttgcgtgcgttggctttggccgggtggactccgcggctgcattcatgcgtggtgtgcggacggcatgtcgccgtctcgccggtcgccggggagagcggcgatgacgggggcgccggggagggccgcatgtcgggcccgatgttcttctccccgtccgccggcgggctgatgtgttcgaccgaccgcacgcccgatgcgaaacgcatcgacccggacgaggtggtgcagctctcggcggcggtcgacggggattggggagtgcttgacggggctccgccggatgcgcgggtgttgcgatttgttgaagactggggcgagtattatctggaacgccccattcgttccttgcgcttgctagattagcggtatggcttttgaaaacgtcgattacacgtcgctggacattccggcggcgccattttccgatcctgcgcgtatcccggatttcccgaagaacaaggtgccccgtcatgtgggcgtgatcatggacggcaatggccgctgggcgcagcagcgcgggctggtgcgcacggacggccatcaggcggccgagcccgtggtgttcgacacgatcgccggtgcgatcgaggccggcgtgcggtatctgagcctgtacacgttctcgaccgagaactggaagcgctcaccgcaggaggtgcgcttcctgatggggttctcgcgtgagatcatccaccgtcgtgtcgcgcagatggacgattggggcgtgcgagtgcgctggtccggtcgccgcccgaagctgtggaagtcggtgatcgacgagcttgaggtggccatggagcgcaccaagcacaacaaggtcatcgatgtggtgttctgcatcaactacggtggccgcgccgagatcgctgacgcctgcgccgagatcgcgcgcgaggtggcggcgggacgcatcaagggcgaccgcgtcaccgagaagatgatcgccgaccacctgtacaaccccgacattcccgattgcgatctggtgatccgcacctccggcgagcagcgcacgtcgaacttcctgccgtgggaggccgcctacgccgagcttgatttcgtgcccgaactgttccccgactgcggccgcgatgtcctctggcgctccatcgaccactacatccaccgcgatcgcagattcggcggcgtgaagaaataggattcccgtttcgccctgtgttggcggggctgttgtgaggcgactgggagagcgctcctcgggcgtcaagaccaccccccccagtttcgctccgctcaacagccccgccagcgggggcgagaagaggaaagctgctcagtagcagtcccaggtgtagaggacgcgtgagaagtcaagccgttccagatcgctgggggagatgaagaagttcgccacgccggagtcgccgaacgacacatcgttggtcgaatcgatctgcagcagcaggtcggtcgccttgttccacagcggatccctgtcatcatgcgggtcgctttgcgtgaagatcgggtatccgccgacctggtgcccgcccgacatcagcagtgcggcgagcgagtcgcgaatctccgcctcatgttcgcggaagaagccgtggtcgtactcgttgagcgtgctgacgcagctttgcagccgtccctcgaaccggtagtcagtaggcgtgatcgtctgcttgcctgcctgtgcgactagccgtcgctcggtgacggggtcgttgaacggcagcaccgtgtcgtcatgccaggcgggtttgacgacacggttggcatgcagtgcggtgaccggcacgttggggaggtagcgcacgcgccacgagcgttgcgactgcgggttgtcgtagtccgctccgtacagggtgtcctcgccgtcgatgaagaactgcagcagtccctgggcggggaatccgcgcagctgcggcagttggctgaagttcagctgagccagcagatacagcgggtccccggtgtcgagattgcgtggcgccttcatgccttccggcacgtagaacgcgccgccgagcttgctgtcggtgatctgtgcgggggagtcgtcctcggtcagacgcagcaccggcatttcggtggaataccgcagcagttgcgaaagtttctcagcgacgtagtcggtgatcctggggatgtgcgcggtgtcctcgtaggcggcgtttcgctgggatctgccggtgacgccaagctggtcgatggggttgcggggcccctctttgtccactttccctacgatttcctgggacggtgtgtcacgaccgaataatttgtccagcaatcccatgtgattccccgttttcagatcatcatccttgcacaggaaagcctagcagctgaaaggcgatttcgctgacgcgattggtgaaggcttggtaccgtcttgcggcgtgtcttcccgatcgcgtcagcggattggcctcagtcagtccaggccgattgacttgagatgatgcagcgtcagcgaggtgacggtcagcgagccggattcggcgacgagcatgatctcgcgcggcagggtcagctgtccgcaccagccgtcgtcctgcatggggatcggctcgacgaaggggctcgtccacccgtacatgatctgccgcccgttcgtgttgaacgactgcggcgcgtagaaattgtggccgcagtcccacgggcggaactcggtttccggcttgaactcgccgtccttctcctgttcgagggacggggcgaaggcgatgggctcgcggcgtcaggtgaccatgtcctcgctggagacatgaccccaatggcacaggccccactgggtgccgtaggggtgcagctggtagaacacgtgccagcggcccttgtagtagcacaggccgttcgggtcggcctccttgcggagctcgtccttctgctcggacgggacccggaacaggtagatgagcagcatgccgaggccgcaggcggccatgaagccggccgacagcacgatggagccgatcagcgcgcccgtgcgggtaggtcttgttgggtgctgagggttctccgcacggctgccgtgccgttgtggggaatcgttttttttgtactggaacaatagaacgtcaatcgatttacgtcaaacgattgacgttgtgtgtcgtgctgcggaagagggtttccggcgaggattaacggcacatatctaccggtgagtgcggcatgaggtaaggtggaacgcatggctggaaacttcgtgcaactgcataaccacacgcactactcgctgctggatggggcatccaaggtgcccgatctggtcaagcgcgtcaaggagctgggcatgccggcggtcggcatcaccgaccatggcaacatgcacggcgcctacgagctgtggcgtgcagcggtcgattccggcgtcaagccgatcatcggcatcgaggcgtatgtgacccctgaaaccgcgcggcaggacaagacgcgcgtgtcatgggacaccaactggaccccggttcccggccatgcccgcaaccccgacgatgtctcgggcggcggcctgatcacccacctgaccatgtgggcggagaacgacgaagggctggtcaacctcatcaaggcgtcgtccgtcgccaacctcgaaggccgtgtcatgcgatatccgcgtatggacaaggaggtgctgtccacctactccaaaggcgtgatcgcctcgtccggctgcccctccggcatcatccagacccgtctgcgcctaggccagttcgacgaggcgctgcgtgccgccggcgagttccaggacatcttcggcaaggacaatttctacatcgagctgatggaccacggactgtccatcgaaagcaaggttaccggcgatctgctgaccattgccaagaagctcggcgcgcccctgctcgccaccaacgactcgcactacgtcatggaggcggacaaggacgcccaggacgccatgctgtgcatcaactccggcgccacgctggacgaccccaaccgcttcaagttcgaaggatcgggatactacatcaaatccgccgaggagatgcgcgagctgttcaaggaccatcccgacgcctgcgacaacacgctggagatcgcggaacgctgcaacgtgatcttcgacgaccatgaggatggcgcgttcatgccgcagttcgactgccccgaagggtgggacgagacctcgctgttcctcaagaaggtcgaggagggcctggagaagcgctacgacggcaacccgccgatggaggtgctcaagcaggccgactatgaatgcggcgtcatctgccagatgcagttctgcggctacttcctcgtcgtcgccgactacatcaactgggcgaaggagcacggcgtgatggtgggcccggggcgaggctccgccgcaggggccatggtcgcctatgcgatgggcatcaccgagctcgatccgctcaagcacggcctgatcttcgagaggttcctgaaccccgagcgtgtgtccctgcccgatatcgacgtcgacttcgatcccgaaggccgcatgcgcgtgctgggctatgtggccgacaagtacggccatgacaaggtcgcccaatgcgtgatctacggcaccatcaagaccaagcaggcgctcaaggactccgcgcgcatcatgggattcccctttgagatgggcactcgtatcaccgaggcgctgccgccggccgccaccggaggcaaggacatcagcgtgcacgacatcttcgacccgagcgccaagcgctacgccgaggcgcgcgaataccgcgagctgtacgactccgatcccgaagtcaagcgcatcaccgaggaggcgaagggcatcgaggggctgattcgccagaccggagtccacgcgtgcgccacgatcatgggttccgcgccgatcaccgacacctcgccgctgctggagcgcaccgacggcaccgtcaccaccacgttcgagtaccatacgtgcgaaacgctcggcctggtcaagatggacttcctcggcctgtccaacttgacggtcatccgcgacacgctcaccaacatcgagcacaacggcaagggcgtcatcgactacacgaagatccctctcgatgaccgggagacgtaccagctgctgtcgcgcggagacacgctcggcgtgttccagctcgattccgacggcatgcgctcgctgctcaagacgctcaagcccgataacttcaacgacatctccgcacttattgccctgtaccgaccgggcccgatgtcgatggactcgcacaccaactacgccaagcgcaagaacggcctgcagaagattacgcctatccaccccgagctcgacgagcccctcaagcaggtgctcgatgagacgtacggcctgatcatctatcaggagcaggtgcagtcagccgcgcgtatcctggccggctattcgctgggcaaggcagacgtgctcaggcgagccatgggcaagaagaagcccgaggtgctggccaaggagaaggtgccgtttttcgccggcatgaaggagcatggctattccgaggaggccgcggaggcgatctgggagatcctggtcccgttctccggctatgcgttcaacaaggcgcactccgccgcgtacggcctgatctcctactggaccgcatacctcaagacgcactacccggtcgagttcatggccgcgctgctgcagggcgcggcgaccaacaagaacaagaccgccctgtatctgggcgaggctcggagaatgggcatccaagtgctctccccggatgtcaacgagtcggtctacgagtactccgcagtcggcgacgtcgtccgattcgggctcggggctatccgcaacgtcggcgagaatgcggtcaaggacatcatcgcggaacgcgagacgggccgtggcaaatacgtgaacttcatggacttcatccgccgcgtgccgttgaccgcgctgaacaggcgactggtcgaatcgctgatcaaggcgggcgcattcgattcgatcgacccgaaccgccgggcgctgttcaccgtgcacgagtcggcgatcgactcggtggtcggcctcaagcgcaagcaggcggaaggacagttcgacctgttctccgacacggaggattcgggcgccgacgcgatgggggatgcgacggtcgccgtgccggacatcgaggaatgggacaagaaggacaagctcaagttcgagcgcgatatgcttggcctctacgtgtcggaccatccgctgagcggcatgcaagcagtgctcgccgggatgcgggagatgtccatcgcccatctgattgaccgtgcgcccaccatgcccagcgggcagcaggtcacgctggcgggactgattaccaacgtcgatcgacgagtctcgaagaagggcaacccgtgggcgatcgtcaccatcgaggacatggaaagctccatccagtgcatgttcttcggcaaagtgtacgaggcggcgagcacggagctcatacaggatgcggtcgtgcaggtgcgcggccaggtcgaggttcgggacgagaccgtcagcatgcgcgccacggaaatgcagccggtcgcgctggagaccgatgacgagcgtccgttcctgatcaccttgccgctggtggccctggggcgcggcaacatgcagcagcttgcgcagatcatcacgcggcatccgggattctgcgaagtgcggcttgccgtgctcgacgccaagggcaacgcacgggtgatgaccttcggcgataggttccgcgtcaaacgcgacaccagcctgttcgccgagatcaagagcctgttcggcccgagctgcctgccgacggcctgagaccatcagccggaatgtgaccatatgcgctacggaatccgctgacgatgggcgtatgcaggtagaatgagagcgaaacggggccgctggctgccgtcaattatgggcctggacctagagggaagaacgatgatagtgtgttcacattgcggcgcagacaacgccgatggaagcttgttctgcagggcgtgcggtgcacaattgacggcggcgacggcacagccggccgctgcggcaccggcgacgcctgcgtacacgatgcagccgcagacttcggcttcacaggttcctcaatcggcacaggttcctcaatcagtgcagtatccggcgcagccgccgcaaccggtacagacgaccgggatgcctcccgttcccgcgcccgccgttcccgcggcgcccggcaccgcttaccagcagcagccgcaaatggccggataccagcagcagccgtatcgggctcagacgtatccgcagcagccggtcgattcccagcagtacggccaataccagcagtcgggcgtccccggagtccccatggctcccgtggcaccggtcgcgcagaagaaatccaagaagccgctcatcatcgtgctcgccatcatcatcgtggccgcgctggtcgtcggcggcgtgtttgttcctgcacctgtcccagacggtcgtcaacggaacgtattcactcagcgtcaacggcaacaccagcaccctgagcgtcgacgggaagaagatgtcgcttgatctgccgggcaatgacgacggaaagtcggcggtcagcgccacgatagacaaggtcacaagtggcaatggcagccattcatacacgctgaaggatctgaagttcagcggtgagagcggcaattacgcgatgtccgaggtcaccggcctcatcgggtacttcggcggtctgggcgaggaacagggcacggccgttctcaacgcgctcagcccgaccgtcaccatccccgatggcgcgtccaagggcgagccgaacggcacctggtcggtctcctgctcggtcatgggactgggcatgggcatctcagccaacttcaaggatgatggcacattgacggtgtcggtacaggccaccggtcatagcgagtcgatgctccatggcacatggagcaagaccggtgacgcgatattcgacatttccttcgatgaatccgatatgactatgacactgtcattgaagaagtgacctgcacgcgctgaaaatatggttgtggccccgacacgataccggtgtcggggccacaaccatattcgcgcacgaggaattcggccgccgtcactcgcgtatgaggcggatgtgctcgatgtcgttgcgcgagctcttgcggtacagcacgaaccggttgccgatgacctgcaccacctgcgcgccgatctggccggcgagcttgtcggcggcctccttcgccgtcagaccggagccgtcctgcacggcgaccttgagcagctcgtggctgtccatcgtctccgatgcctgcttcaccgcggcgtcggtcaggtcgttcttgccgatgtagagcagtgggttcagctgattcgccatcgcgcgcagctgcttgacctgcttcttgctcaatgccatgtctggtcctctccgtcaatctgatgtgctgtgtacgaggatagcggagcggcacgatgaacggcatggacgcttctggaaatccttcaaaacaccgactaatgtctatggcggggacgaaagaaatgcgacatcatgtctggtaatgatgtcgcagacatccacaatatcctcaaggaggcggaatatgtattattccagtggcaactatgaagcgttcgcgcgaccgaagaagccggcgggtgtcgacggcaagtcggcgtacatcatcggcatgggacttgcggcgctgtcggcggcctgctatctggtgcgagatgcgcagatgccaggcaagaacatccacatcctcgaaaaggacgcggtggccggcggggcgtgcgacggcgccgacatccccggcctcggctatgtcatgcgcggcgggcgcgagatggacaaccacttcgaggtgatgtgggacctgttccgctccatcccgtcgatcgaaaccgaaggcgtctccgtgctcgacgagtattactggctcaacaaggacgaccccaactattcgctgtgccgcgccaccaaggaccgcgggcaggatgcgggactccagggcaaattcgggctgagcgacaaggcctcgatggagatcatgaaactgttcttcactccggacgaggaactgtacgacaagccgatcaccgatttcttcgacgacgaggtgctgaaatccaacttctggctgtactggcgcaccatgttcgcgttcgagaactggcattccgcgctggaaatgaaactgtacatcaaacggtacatccaccacatcggcggtctgccggacttcagcgcgttgcggttcacccgatacaaccagtacgagtcgatgatcctgccgatggtgaagtacctcgaagcgcacggcgtgcagttccactacaacaccaaggtcgagaacgtcgagtttgcgatcggtggcgggaacggacccgaacgcgagcgcaccggggtcggacaggacacgatccagaagatccaggccacgtccggcttcttcaagcgcaacccgtacggcacgaacacgaagaaactcgccgtccgcatcgacatcgaccacgaaggtgacaagtcgtccatcgacctgacgcagaacgatctggtgttcatcaccaacggcggttgcgtggagaactccacgatgggctcccagcattcgccggccgcatggaatccggacctcaagcccggtggcggttgggacatgtggcggcgcatcgccaagcaggacccgagcttcgggcatcccgacacattctgctcggacccggatgccaccaagtggatgagcgccacggtgactacgctcgacgcagagattccgccgtacatcaaacgcatctgcaagcgcgacccgttctccgggcgcgtggtgaccggtggcatcgtgaccgtggaggactccaactggctgatgagctggacgctcaaccgccagcagcagttccgtgaccagcccaaggaccagctgtgcgtatgggtgtatggcctgttccccgacaagccgggcaactatatcaagaagccgatgaccgaatgcaccggcgaggagatctgcgaggaatggctgtaccacatgggcgtgccgaccgacaagatcgaggcgctcgcgaaatcccacgcgaacaccgtgccggtcatgatgccgtacatcaccgcgttcttcatgccgcgttcggccggtgatcggccggacgtggtgccggatggcgctgtgaactttgcgttcctcggccagttcgccgagacaccgcgcgacacgatcttcactaccgaatactcgatgcgcaccggcatggaggccgtgtacacgctgcttgacgtggaccgcggcgtgccggaggtgtggggcagcgtctacgacgtgcgcaacctgctcaacgccacggtcaaactgcgcgatggctccccggtcaccgatatgaagctcaatgtcgtggagcgcgccgttatgaagaaggtcctcaagaagctcggcaagaccgacatcggcatgctgctgcgcgagtacggggcgatctgacggcatcggcctcgcagcgaaccgttctcattaggaaacgtgtgaggattcctcgcgtaaccgcacaagtgaacatttcggtaaggcccggaattccgggcctctgaagggttccgtgttcgtttggcggaccgcagggctcgcacgtttcccagtgagaacggttcgctgcgtatcgcgggctgtgtcatcgccccgcctgatgcaatgctctcagcgtctgcagcagttgctcctgcaaggccgtcctgccggcgaagtactggaagtcgtcgatgagtaccatgtcgatatgcctaaaccggttgccggacagggtgatccggtcttgttgcgggtcggcatcctgcgccgtcatgacgaattcattggcatgatcctcactggtgagatagaggcacttcgcggaagggagtcagcgcgagcgtttcgaatgtctgatccctgttcagacgtgcagtcagattgatggcgggcatgatcgtctcctgtgggttgctctccattcggtagacggattcgcctcaccgaatgcggggattccaacatagggtccgattcacttatccggtagatatgttcctcttattgttgcgcgtatgtcgacaccagatattccccggtatcgtgcagcatcttgcgcaatgaagccggcgacaatatctcgatgatgtgcgaatccgcgtactgcaacgcccaccaaagggtcgcgtgttcgttcgcgacgacgtgcacatcgtattcgcgctcgccggtctggacgacatcggcgtcggcgaaccagtcgtacagcggttcaagcgccccgtggatcttcatgtggatcggcgtcgccttgccgtccatcggataaggtcgctcgttcatatgccgcacgatgtcgaacggttgccccggcgtggggctgaagctgtcgagcgtgcgtttgagtgagtggtccggcccctcgatggacaggtcccggatgcgttccacatgcaggtaggacagcgagtcataccggtgcatgtggcacagcaggtagtatttgctgttcttgtacatcaggtggtaggggtccgccagatatgtcttgatgtcgccgtcgccgttacggcgggggacgagattgccgttgacgtcgtacgtgcagtaccggaaccggatcacgcgcccgtatgcgatggcatcgttcagaatctcgatgttgttgaggaactccgtattgtagttcttgggtgtggtgagttgttcgaggccgcgcaattggccggatttgccggcgaacgtgtagatcttggcgatgagttcgcgtaggtattcgccgtccgagctcgacagcgccgcgccgtccacgagcaggcgcatctgcgcgatgtcgaagaccggttcgatgtaccagccgggtcgggggttggcgctttccgcgttgaccagatcccgccggtcgaggtggcccacatggcggtcgaacggcgtcatggactgcaatgccttgagatgcccgcgcacggttttgtcggatacattgatgcgtttgctgatttccgcggcagtgaggccgtgctcggggtcggtgtgcttgatgagctgttccaggatttcgatgacgatctgagcggtggggagtgccgatgatgcagccacgatgtctcctctcccttgacggataccgtgccacctgggtgattaaaacggtagataactaccggtaatcatatcatcgcctgttgcgtgtggcgtatcgctctcaatgagagcgatacgccacacggataaggatccatcagaaatcgaaattgtccgggtcggcgctgttgcgcttaccggtgtccatggcactgatcgcagccatgtcatcgtccgacagcacgaagtcgaacacgtcgatgttctgcctgatgcgatcggcgtgcgtggacttcggcagcacgacgacgccgcgctggatgtgccagcggatcacggtctgcgcagcggacttaccgtacttcgcgccgatctcggccagctcggggatggcgagcaggtcgccgccggtgccgcccagcgggctgtacgcctcggtggcgatgcccttggcagacagctcgtccaccagcggctggttggtgaactgcggcgaggattcgatctgatcgacggccggcgtcacgtcgctgttcttcagcaggtcggcgagatgatgcggctggaaattgctcacgccgatcgccttcgcacgcccggaggcatagatctcctgcaggtcgtcccacgcctgctgccagacgtccgccggccagtggatcagatacagatccacataatccatgcccaggcggtcgaggctctcctggaacgcttctttgccgcggtgcgcgcgaatgtcgtcgttccacagcttggtggtgacgaacaggtcgcctcgcggcacgccggaacggcggattccctcgccgacagacgtctcgttgcgatatatcatcgccgtgtcgatatgcctatatccgttctccaacgcggcctgcaccgcgtttaccgtcgtgtcgccgtccggcgtgcggaacacgcccagaccgatctgcgggatgaccgtgccgttgttcagcgtgatcgtcgattgaatcgccatgaccattgtctcctgtgatattgccgatgatgcgtcgcagacaattgtaatgatgccggcgaaggcgaatcgacaggcgagcaggcaatgctgcgcccgcagggcgtcccaaatcgcagggcccggccgggacgggggggcgtttcctcgccgtgcccgaccgcgggtgggccagagatgaacgatgacgcttgcgcatgcatggccgcgtattaccatgagtactggttcgcaggtgtggcgccgtggggtgccgggcggcggcgatcgtccgccgcgaatccgtggggaaacgaggcatatggtgagtgatgacacgacgcgggggcagcaggggagtgccgaggctcaggagctgacgctgaacgacaaggcgcattcggtgattcctcagatagggttcggcacgttccagattccgccggaggacacacagcgcgcggtcgaggaggcgctggagatcggctaccggcacatcgacaccgcggccgcgtactacaacgagaaagaggtcggcgacgcgctgaaggccaccggcatggccggcaaggtgtgggtgacgaccaagctgcgcaactgcgaccaggggtatgattcgacgatggtcgcgttcgaccgttcccgcagcaacctcggcgtcgacgtggtggacatgtatctgatccactggccgttcgccgcggcggggttcttcaaggagacgtggcgcgcgctgctgaagctgcgcgacgaaggcgcggtccgtgtgcccggcgtcagcaacttcctgccgcagcacctgcgtgcgctgatcgaggattccggtgagaccccggccgtgaaccagatcgaggtccatcctcggttcaaccagccgggaaaccgtgcgttctgcgcggcgaacggcgtggccgtcgaggcatacagcccgctcggccacggaaaggacatcgaatccgagcccgtcgtcgccgcggcgaaggcgcatgatgtcacgccggcgcaggtggtgctgcgctggcacacgcaggaggggcgcatcattatccccaagtcgaagcacgtggaacgcatgcgggtgaacctcgccagctccgatttcgatttgacgtcggccgaactggcggcgatcgatgcgctcgacgacccgcatgacaacgtcagcgccgatccggcgaccttcatgcattcccagtcgtgggccgaccagcacgtgcgcggcaatatctgattgtggcggggagggacggtcggcgggatcacccccagtcggctgcggcttggtctgtgggcgagatgtaagcgggcgtgggttgtgcggaggtgtgcggtatggatggtgaaatggagcgggtcttgccggatgatgcggacgatggtgccgaacgccggtggatcgatgacacgctgaaccggctttcgcgctcctcattccgtgcgaaattcgagttgtcggcgaaggaccgcgcgtatgcgcgggcgaagggcaaggccatgatcgatcgccatgcccgcgagctgctgcgcgcccgcatcggggcggcgaatccgcgcaacgacgggcgccagacgccgtggcgcgggcatccggtgtttaccgcgcagcatgccaccgccacgtgctgccgcgggtgcatcgccaaatggcaccatcttccccaaggcagggagctcaccgatgccgaaatcgatcgcttgacggacctggtcatggcgtggatagagcgcgatctcatacgtcatcccgccgtctgagttcgtccatcgtgctgcatccgccgcgggcgaggcatacggttcggggccgatgttgccgccgccgaaaaaaatatgaaggcgattacaatcgtgattttttgtgaaggtgttgcgtcgctgctggataaatgaccgtttctcagtcgcagaggaagttatggcgatgatggcacaagacggaacctgtctcatatcacggtcgtcgcgaaaggaaaattactggtttgtaatggaaaaaccagacaactattttcaaggaaagcggtgcgtggtggcactgatagtggccatgacgcttctttcgggagcgggattcacggcgtccgtagcatccgcggacaccgacacggtgggctatgagactgatcgcattgcattttcaggggctcggaccgtatgcggggagggctccatcgatttcgcggctctgacccgctcccggatgttcctgattgacgggggccggcgtggaactgaaggggcctgacaccgactatcagtgcccgggtggcatcatcggctttgacaattgctcgaatgccggttacggcagtgcggagatcatccgtccgacggatgtcaagggaaagaagaagccggattcgtcgcgtccctatctatgtttcctggccgaacacatgaatgtgcctcctgctgacgatgccgtgtactatctgcaggaatgaccgggcgcgggcctgcgccggaccggtgtagaggtgaccgggctgtcgaagttgtgccacaccagggcaatttcggcggttttgagcgtggtgtggccacgtccgtatgtagggatgtttacacgtggcgagcaaaccgttggaaaatggcggtttgtggtttcagccgtctgcccgcgctgtaccataccagagaatgataaggttaacatcgcattgtgaggcacgcgaattgccacacaatgcctagaagacgtgttttttcgctggtgtggtacagactcgacgccgatcgtctcacattgcagacggtgaatctcgaagcatggatggcgcggccctgccggtgcatggcatgatgatgcgactcgtgtcagaccgcggattcacgtcgcttttttcggtcagccgccttttcccggcgtgccagctcctcgaccgtcatggcgatcacacgaaaatcgacgtcacagccgcggagggtaagctcacgcgcgacattgagcgcgaattcggcacatgcgacctcgtctctgatgtcatcggccgttatgacgatgatcgtccatcccaattgccgaagccggtctcgttttttgcgatccctgcgccattggtgcttgtcagtccgatgatgatcgccgtcgtattccacggcgaccttgaaatgcttccatgcaatgtccaggctcattggcttgcccgaatcgaacatcgccctgtcgacatggcagttgacctcagcgtcgggcaggccgtgccggaggagtaccagtctcgccttgctctccttcggcgacagcacgttggccttgaccagctgcagtgcggtccggcaagcggtcttcccgagaaagtatggcgcattgtcgatgaactcgcgcaaggacgacaagaccagtcgtggatatctgcccgatgatttcgatatggcggtgatgatggcctccgccagtatgacgagttcctccaaggacacgtgtgatgacagctgcgcccaggcatggaagggatgcaacgcgaatacattgcccttgatcggtacgcaagcatcaggataagtggcgatcagcttccatacatgcggatgcgtgccgggaatgcggcgccgcctcctgtcgggagtgctggaggtgatgtgcagcatctccgcgtccagatcgcagacctccggcaacggcacctgctgcagggcgagagcggtggtcatgccgaacagcacattgcctccgatgcgccacgccaatgcggcgcagcacatgatggcatcctgggcgcggtcgcgcagcgattgcgtcatgggcgttctctcgcccatcggctggggcatcacatcgttcatgaatgtcacggtagcgtattcgcgctgtcggtgtgatgaaccatggaaaaaatgtggatatgtggatgaatgcatggatatccacagctatccacatcgctgacgagcctggcgatttctcacgatgtgggtgatacggcgattctgggaggattacgacagcgtgcattggtacgatagggcgttatgagcgagaacatcatgcgaatcattgatctgcggggcaagaacctgtcccgcgccgagttacttgccgcgatgccgcgcgccgcgatgggcacttccgaagccaccgatctggtgcggcctattcttgacgacgtcaaggaacgcggcgccgcggccctgcgagacttcgaggagaagttcgatcatgtgcgtcccgagcacctgcgcgtgccggtcgaggcgatgaccgcggcacttgagacgcttgatcccgaagtacgcgccgccatcgaggagtccgtgcgtcgcgcacgcgccgtcgccgccaaccaggtgccgaaggacttttacaccgatctggccgaaggtgcccgcgtcgccgagcgttggattccgatccagcgcgtcggtctgtacgtgcccggcggcaaggctgtctacccgtcttccgtgatcatgaacgccgtgccggcgcaggccgctggcgtcgagtcgctggccatcgccactccgcccgcacgcgacaacgcggaaggactgcccaacaagaccatcctcgccacctgcgccatcctcggcgtcgacgaggtctacgcggtcggtggcgcccaggccatcgccatgttcgcatacggagccaagggctccgagccgcaggacggagacgtgctgtgcgacccggtcgacaagatcaccggcccgggcaacatcttcgtggccaccgccaagtcgctcgtctccgcgttcgtgggcatcgacgcggtcgccggtcccaccgagatcggcatcatcgccgacaagaccgccgacccgagcctgctggccgccgacctgatcggtcaggccgagcatgacgagctcgccggctccgtgctgttcaccgattccaccgagatcgccgagaaggttcaggagtccctgaactaccgcgtgccgcgcaccgaacacgccgagcgcgtccacacgtcgctgtccggaagccagtcggccatcgtcctgaccgacagcctcgaccagtccatcgacgcggccaacgcatatgcggccgagcatctcgaagtccagactgccgacgcggacgccgtcgtgccacgcatcaagaacgcgggcgccatcttccgcggcccgtactccccggtgccgctgggcgattacatgtccggctccaaccacgtgctgcccaccggcggcaccgcccgcttcgctgcgggactcggcgtgcacacgttcatgaagcccgtcgaggtcatcgaatacgacaaggagggcctgaaggccctcgccgcgcgcatcaacgccttcgccgtctccgaggacctgcccgcccacggcgagtgtgtcctgtcgcgcttcgtcaaggatccgtacgacaaggccacgctgcgcgaacaggagaaggaagccggtctgcgctaagggctgcttgggtggttcgacccccagtctgccgcgcagacagcccccgccagcgggggcgatgagcggatcgaatgtgccgcgtgcgaatgcgaatacagcccccgtcagcgggactatagacggaaagaacagagagcaatgagtgagaacaacagcaatgcaattccggcgagcctgccgctcaggaacgatctgatcggcgaggagccgtacggcgcgccgcagctcgacgtgccggtgtgcctgaacgtcaacgagaacccgtatgcgccggatccggccgtgtgcgacaccatcgccaggcgcgtgtgtgagatcgcgcccacgctcaaccgctacccggatcgcgagcatatcgaactgcgccaggcgttctccgactacctcgcccgcgaatccggcacccgtctcgacgtggacgaactgtggggcgcgaacggctccaacgagattatgctccagctgttccaggccttcggcggcccgggccgcaccgccttgggcgccgacccgacctactccatgtaccccgaatacgcgcgcgatacgttcactggctggaagctcgcccaccgcaacgccgatttcacgctgaacgtcgacagggtaatcgaggccatcgccgaggtcaagccctcgatggtgctgctcaccagcccgaacaaccccaccggcacgccgctgccgatggccgacatcgaacgcatcctcgccgcctgcgagaccgccgacgtggcgggcgcgggcgaaggcgtccacccgatcctcgtcatcgacgaggcgtacgtggagttccgcaagcccggcacgccgagcgcggtctcgctcatcaagaaccacccgaacctcgccgtcagccgcacgatgagcaaggcgttcgcattcgccggcgcacgtgtcggctatctcgccgcgagcaagggcatcatcgactgcgtgcgcatcgtgcgtatgccctaccacctgtccgccgtgacccaggccgccgcgctcgcggcgttcgaacacaccgacgagcagctgagccgcgtcgagcacctgcgtgagatccgcgaatccaccgctgaatggctgtcacgtcagacctacaagggcgagccgctcgaagtggctgagtccggttcgaacttcctgctgttcggtgggcatttcgacgaccgcgaggccatcttcgacgagctgctcaggcgcggcgtgctcatccgcgtggtcggcccggacggctggctgcgcatgtgcatgggcaccgacaaggagatggaacaattccgtaacgcgctgaccgaagcattgcgtattgtagaaagcagataacaactcccgaaacgccggcggcgcgcgcgaccatcaacgtcatgacccgtcgtcggcgaccgccgaccggcacactggccggcaggcaaaccgggacttatcgggacatatcaggatcaaggaccaaggagcacatcatggcgcgtaccgcgcacatcgtccgcgagaccagcgaatcgcacatcgaactcagcctgaaccttgacggcaccggcaagaccgacatcgacacttccgtgccgttctacaaccatatgatgaacgcgctcggcaagcattcgctcatcgacctgacgattcatgcgcacggcgacaccgacatcgacgtgcaccacaccgtcgaggatacggccatcgtgttcggcgaggcgttgaagcaggcgctcggcgacaagcgaggcatccgccgcttcgccgacgccaccgtgccgctcgacgaggcgctcgccaaggccgtcgtcgacatttcaggtcgtccgtactgcgtgtgctccggcgaacccgacggcttcgaatactgcatgatcggcggccacttcacgggctccctggtacgccacgtcatggaatccatcgccttccacgccggcatctgcctgcacatgcaggtgctcgccggccgcgacccccaccacatcgccgaagccgaattcaaggcgctcgcgcgggcgctgcgcttcgcggtcgagccggatccgcgcatccagggcatgatccccagcacgaagggcgcactgtgatgagcggcaacgacgacaggcacggcggagacgacggtttcgacgacgacatccatttcagcgacgaggaacttgaggccgcgctggacggattcgagaaggaattccgcgattcgaacgcggctgccggcgaaccggcgaacgacgccgcggccgacagccccgcagacgatgcgggagccgcggattccggtcaggcacaggaggccgacaccgcggccgcgttcgacgacgagctgcaagggcttctgggcaacaaggcgaaggccgccgtgctgattacgcgcgtcgcgtccgcccgcctgctcgccgcgttctgccagctgtcggacgtgtccgccgactgcatcggatcggaggaaggggccgtggccatcctgcgcaaccttgacggcgacgggcccgaagtcgcggcacgcgacctcaccatcgtcgtgtcgggcatgtcgctggtgctcgccgtcaaccgtgcggacaagttggaggcgaccgtctatctgcaaggcaagccggggcagacgatcgccccgccgctgctgttcacatcgacggcgccgttcgtggaggatctgctgcttggcatcaccgacgaggacggcctgatcggcaccggcatgaaagtcgaacagtccgcggatctcgaccatgaccaggccatggccgtcatcgcggaacacacgaagttcgggcgcggctcgtcgcgcatcgaataatcgggcggccggcggacgccgcccgtgcccgtgcggccaaagattttcagactgaaggagacgacatgacatcggtggtggtattcgactatggattcggcaacgtgcgttccatggtgcgtgcgctcgccaatctcggccttgacacgacactgacctccgactaccggcaggcgcttgaggcggacggcatggtcgtgcccggcgtcggcgcgtttgccgcctgcatgaccggcctgcgcgaggtgtcgggcgaccgcgtcatcctcgaccgtctgcgtgccggccgccccgtgctgggcgtgtgcgtgggcgagcagatcatgttcgagcgcggcaacgagcacgcagacaccaccgaaggacttggactgatcggcggcaccgtcgatctgctggatgccgatgtcgtgccgcacatgggatgggacacggtcgaggcgccgtccggttccgcgctgctcgaaggcgtggagaacgaacggttctattttgtgcactcctacgcggcgatgagcgccaccgcgaaggatctgagcgccgagcaggtcgatctgggcggcgacgagcatatcacgtggtgcacgtatggccgtagcaggttcgtcgccgcctatgagcgcggcccgctgtcggtcacccagttccaccccgagaagtccgccgacgccggcaaacagctgctgcgcaactgggtcggcacgttctcgaagtagccggctgaacggcatgaccagccggcgcggccgggaaccccgactcacccggcaacgcggacggcgggccccgagcctcaacgacttcaacgattccaaaggagaacaaccatgtcactcacattgcttcccgcggtcgacgtgcgcgacggcaaggccgtgcgcctgcgccagggcgaatccggctcggagaccgactacggcagcccgctcgaagcggcccgcacgtgggtcgaggccggtgccgagtggattcatctcgtcgatctggatgcggcgttcggcacggggaacaaccgcgcgcagctgcgtgagattgtccatgagctcggcgacaaggtcaacatcgagatgtccggcggcgtgcgtgacgacgactcgctgtccgccgcgctggaggccggagcggcccgcgtgaacatcggcaccgccgcgttggagaaccccgaatggaccgcctcggtcatcaagcggtacggcgaccgcgtcgccatcggacttgacgtgcgcggccacacgctcgccgcccgcggatgggtcaaggagggcggcgacctgttcgagacgatgaagttcctcgactcggtcggatgctcccgctacgtcgtcaccgatgtggcgcgggacggcatgatgagcggcccgaacatcgacctgctgcgcgaggtcgcggaacgcaccgatgccaaggtcaccgcttccggtggcatcagcaagctggacgacctgcacgatatcaagatcctcgccgatttcggcgtggactcggccatcctcggcaagtcgctgtacgcccgcgcgttcacgctcgaagaggcgctcgaagtcgcccgctgaccgatacggctgtcgacgggggccgcccccccgccgcccgtcaccgtcggctgggcggccggcggcccctgctcacttcttcgcgccgcttttcttcgagcaggggagctcgcccttcttgatgagcttcctgaacagggagtaatcctcctcgttctgctccgcatacgcttgggcgaacgcggctatcgcctggtcgaactcgtcggtgcccccaagatagttggcgatggccacgctgtcgccggtgcgggcatgcgcgtgcgccaggcaccatgcgcacatgcggcccagatccgacaatcccagcgcgttcagatgatcgatgtcgatcgagcccttgccgttccagaattggcgcacgtaatagtcgcgcggccggccgtcctccgccacgaaactcgcccagccgagcagcacgtcggcagtggattggatcagcttctgcccctgcaccacacgctcgccatgcgtcgcatacggcgagcggccgacgaaccgttcgaagaccgactcgttggcctccttcatctgcagcatcagcgggtcgtcaagcccccgtccggtgagaatcgacacccaggcgcgggttccgaccgagccgacgcccacgaccttgcgggcggtgtcatggtaccggtaacggttcagcacgtaacgccggtcctcgtacaggctttgccggtagctgtcatacagtgcgtccagcctctcccgcagcaccccgagatccgcatagtcctgcagctcgctgatcggcaccagctccggcggcttcgagcggaaccgcagccgcttctcgccgctgtcaagataggtgagcttcgcggccgcatggtcggaatcacgcaccgacgcgcgcagcgcggcgtcgcgcaacgtgcggttgcgcttgccgttcaccgtgctttcgtaatggtcgagcgccgcctccacgtcgagatggtcgtaccagacgtcgaggaagtccatctgcgagaactggcggatatggtcgcggtacgagtgcacgcagcgtgcgaccgcgttgcgccggtccttctccttgatgccgttcgcccgcccgcagatctccacggacaccgcgagccgcttcacgtcccattcccacggtcccgtggttgtctcgtcgaagtcgttgatgtcgaacacgagccggtcgctgggggagcggaacatgccgaaattgccgatatgcgcgtcgccgaccgcctggacggggatgccggtggtcggcgtgtgcgcgaggtcgttcgccatgatgagcgcggtgccgcggtagaacgtgaacgcggaatcgctcatgcggtagtacctcagcgggatcagatccggcacccgctgcgccgactgttcctccaaaagcccgatcacgtcgcgccggcgcgacacgatcttccagtcggcgtggctctccaacggtgtggtcttgcgcagcgcgatgccggccttggcctgccccagcggcgtgtcggccatgtgccatgacatatcgatgatgggatggttctcgctcatggctccacgataacgccgacgcgggagcgacattccggcgatgccccggcgtgtctgatggcatgttaacgagtctcgtaacacggacgtgaaaccatgagggattatggataagcagcaagagtttgccctgcgcacggtcgaggaacgcgacgtgcgctttattcggttgtggttcactgacgtgctgggcacgttgaaatccgtggccatcgcgcccgccgagttggaggcggcgttcgaggaggggcttggcttcgacggttccgccatcgagggaatgacgcgcgtgtcggaggacgacatgatcgtgcagcccgacccgtccacgttccagatactgccgtggcgtggcggcccgcagggtaccgcgcgcatgttctgcgacattctcacgcccgacggcgagccgtccctgggtgacccgcgccacgtgctcaagcgtgcgctcgccaaggcgaaggagaagggtttcacgttctacgtgcacccggagattgagttctatctgttcgagaaccagaccgactggtcgaaggcgccgactccaatcgacgagggcggctatttcgaccatgtgccgcgcagcccgggcatggacttccgccgcgccaccgtcaacatgctggagcagatgggcatctccgtcgaatactcgcaccatgaggcgggtcccggccagaacgagatcgacctgcggtatgccgacgcgctgaccacggccgacaacatcatgacgttccgcacagtcgtcaaggaaatctcgctggagcgcggcatccacgccagcttcatgcccaagccgctcgccgacgcgcccggttccggcatgcacacgcacctgagcctgttcgagggtgattccaacgcgttctacgaggccggccaggagttcaacatgtccctgaccgcccgacagttcgccgcgggcatcctgcatcatgcggcggagatctgcgcggtcaccgaccagttcgtgaactcgtacaagcgactgtggggtggtgctgaggcgccgagctacatctgctggggtcacaacaaccggtccgcgttgctgcgcatcccgcagtacaagcccggcaagggcaactccgcgcgtatggagttccgtggactcgacccggtggcgaacccgtatctggcgtattcggtgctgctcgccgccggtctggacggcatcgaacagcagatgacgctgggcgagccgaccagcgacgacgtgtgggagctgaccgacgccgaacgtcaggcgatgggcatcgagccgctgccggattcgctggacgccgcactgaagatcatggagaagtccgatttcgtcgcggacgtgctcggcgagcatgcgttcgagtatttcctgcgcaacaagcatcaggaatgggacgaataccgtggccaggtcacgccgtacgagttgaagaagtacctgcccaagctctgacgtgacgtgaaaccggccgactaccggcaaacaagaaacggtgtggggatgatggctgctgatccggccatcatccccacaccgtttttgtttgccgaaccgaccgccgcaggatgccgctgcggtcactcgaccttgcacggcgtcatcttcttggtgaccatgtcgttgcccccgtaggtgctggacaggcgaaccttgaccggctggcccgggtcttcgaccacataggagaccgtcgccttggccaggacccccggctggacggagcggctgaaactcatgttctcgtacccttgtgggagcggcggctcggtgtagtagttcatttccagctgggagccgtcctgcgtgacggtgagcttcgcggcgttggacaatggctcattggcctcggattggttcacccatgtgatggtgacgatgatggtgtgacggccctgatagtcgtcggggcccgtcgtcacgtcgtcgatggagacgagggcgtccccgctgtagctgctgatccgcttcatcttgcgcttctccgcctcggtggctttcggggcgggagcgatgtcgtcaggctggacctgctcgtattgcgtgccgctggtcggtgccttgaacgcggacacgatgccctcatggtagcgggtcgcctgattggctacgacgtacaggtcgcccgtcgcgtcgtccagctggtacgcgatggtcgcgtcgctttcctcgcccttggcgatcttgatgtcgtccgactgcgtcttgtacccttcgatggatgagccgccgcggctgtgcaggtaggttttgttcaggccgatgccgctctgatacacctgcaggtccatggcgagttccccgaaggtcgtattggcatcgccggtgttcttccaatggtaggtgatgatcaccgtcttgtgcccgtcgtgatccgtggggccggtggtcgccttggctatggtgaccgtggccttccggttgccgaacgatgtcgtctcgccggttttcacgcgggtcggcttgttgtcttgggagggcgacttgaatgagtacgatgagtcgtccgagtcgctgctgccgtctgtgctgatgatatgactcaccaggtttgatcccagcgcgaacacgattatggcgatgacggcaacccaggatcggcgctggcgcttcgtggctccgccgggtttgcggtcgctcttggactgcacgtgtccgtagccgccgcgatatggatggccgttgtagggcagattgaggggcgcatcgcccgctccggtccgtgccggccctggtttgtctgcggggctcggggcggccggcttgcctgccggtcggcgacgatcggcatcggggctgattcggccgcttttgggctgctgatacgccggctcgtcgacctgcgaggtctgggaatcgatgctgatgtacgccggcgaatcgtccacatcgaacggcgatacataatcgtcgtcatgatgcctgctgaacaatcccatgcctgttcccttgtctctcggccgcgcacggtgatgcatgtcttctcccattgtaggcggcgtgccggtgcagcgcgagcgccggaaggtgaagaccgtcgaaatcgccggtgaatgatgggccgtgcgtcttcggcgcgtctcctgcgtgtctcgggggccttgcgcggcaggaggtgccgctaatgtatgttccgtctggaagaagagaaaaacagcaggggtacggtcatgtccggttccgccatccgtgggcggcaggggagcgaacgcttcttcacgctgccggccgtcacgctgatcgcgtccagtttcgtgctgggcatgagcgatttcgtggtcgtgggcatcctgcccgacatcgcccacgggttgcgggtctccgaggtcacggtcggcaatctggtgtcgcggttcgccacccatctgacgttgatcggcgtgttcctcgccggcaacatcctgtgcgcgctcgcgccgaattatgcggtgctgccgcattacagacacatggcgaaggtcggttttctgccgcagttccgcatgcggaccggcaatggccgtctcagtgccttgcgtctccgaaccatccccggtagatgatcgagaagttcctgttgccgtagctggagcaggagtctccttccccggctccagcggcgagtgcggcctcgttcggctggtagggcgtgtagatgtacagcagtgcggtcgccttgttgccgatgaccacgttggcgccgccgcagctcgtgttcggatggaacctgacgaagttgagcttgccgacatggtaaccgtatgatgcctcatgccgcacgtaatacctgtatcgatgcgccgcgccgtagacctgccggaagaagcctgcgtactgcgggtcgcagtcgttgtcgtcggggcagctcaggcccatggccgccttgaactggaagtcggtcggcttgctcgcggtgacgagctgctgttccttctgcagcacggtaagcagcactttctggctgatgccgcatgatcgcgacgatttgtcgatgatcgtcgccgcagtctctcccttggcgccgtcgtatccgtcgcagtaccggtcatcgggctggtccgtggtgtcgaacgtgcggtttttcaggcatcccgtcccggtgcagtcgccgccgtgctcatcgaggaacgattgcacttcggtgcggctcatcgcatagccgttgaagaactggccgtcggagatgatgttgcccgggtcgaaaccgtatcggtcgcccagattctgctgtcgttcctcggccgtcacgagcgcgatgcgctgtccgacgaacgaggtggtgccccacgccagcgccacggcgcacaccgccgccagcgcggtgcccgccgtggcgaggatgcgcctgcgccatccagcccgcttccaccagcggcgcagcgtgttgcgtcgggccttcggcttcgggcggcggatcgcggaccgtgccgctgtgccgtgcctggtgtttttggtgttgtttcccctgatgtttttcttggcggccgtaccgggccggcggttgcgttgcttgccgccgttccgtcctccggtccgcccggtgttgttcccctgcttcttacgtgttgtcatcgtccgtcattgtagcgcggggatatgttggatgcgcggactggccgtgcgcggcgacgggggagaggccgcgcacagcgctatctgccgagcgttttcttgattcgctgcaagctgaccggcttcgcggtgccaagctcctgggcccacagagagacgtagaactcctccagcatccagcgcgcgtcgtcggcctgtttcgtcagtgcctcatggcgtgggcccgcgggctccgtcttggcacgctgaacggccttgtcgaccagctgtcgcgcctcgtcggcctcccaggcccatcgcacgtcgcggttcttgtcgttcttcgccttggtgagacggatcaggtcggcctccagatacttcggtatgcgcggcagggcggcgggcggcgtcgcgccgatgaacccggggaacaccagcgtggcgatatgctcgcgcaccgattgcagcaccgacagcatcggcaggtcggccttgccggaggtcgccttgtcgacattcgcgtacgcgcgcaggatggcgatgacatcatgggcgagtgcgtagacggtgtcctcgtagacctcggtcacccccatcaccgcatcggcgagcgcatcgtcgtcggggagcgtgtcgatgttcggcagcagacgtttgacggtggccagctgcaggtcctccaccagcgccttggtggaggggtatggcgccgacgcgagcatcagcgcctcggcgccgagccaccgagacgagatacgctccgaaggcatgcgcagcgcgtccagggcgccccgccacagcatcaccgcgcgcgactcgctcgtcgccccggccttgtgcagcaggttggcctgttcgaccagtttgccctggctggcggcctgttccgccttgtgttcgaccatgcgccgggcggatgcctccgcctgttcggcgaactgccgttgcaacgcggtcagggatttgcctgaacccagtaccttcaccgggccgcgtgcatgccgccgcccgcgtgcgttgcgcggcgcggggagttgctgctcgatggagaacgtcatccgcagataggcgggcagcttctcccatagttcgccggtcagcacctccgggtggatctgagcgcccacggtgtcgatcgccgcctgggtgaacacgtgcggcaggtcgggccatgcgtggccctggccgtcggacgtgccggtgccgggcagggccggataccggtcgtctatccatgcgcggatcttgcgcgcggtgtccggtgcgggcacgaactgcacgcgcagtgatttcggcagggacttgatcagccccacgatcagctcgtcgagcagtccgggaacgttccatgtgaactgttccggtgtcagacgggacagcgccttgagcggcacgtgcacggtcacgccgtcggcggggtcgtgcgggtcgtagatgtagctgagccgcaggtcgatcggctggccgtccgtgccgagcgcatgccaatggtccggatagtcggcgaggctcaccgactccgccgatgacaggcgttcgaccttgtccgggtcgaaatcgagcagatgcgggtgttcgccgtgctcgcgcttccaccatttcgccaggtcggcgacgcaggtcacgtcattggggatgaccgactggtagaagtcgtagaggtcctcgtcgctgacggactgcgagacctgcctggtgcgactggcgtcctcggccgcctcgtccaggatgtcgcggtttcgggccaaaaaatcgtcatagctgaaccgctgctggacgtccccctcgacaaggccctgccggatcaggaagtcgcgggcctccatggggttgatgcgcccccattgcacggtgcggtccgagatgatcggcagaccgtacagcagcaccttcgccgtggcgacggcggagccgcgcgaaccagaccagtgcggctccgcatacgtggtgcgggtcagctgcccggccagcggctcggcccacgccgggtcgatggcggcgctgtacctcgcccacaggcggctcgtctccaccagttccgtgctcatcacccactgcggggtggatttggccacggccgaggccgggaacaatgcgaaatgagtgcctcgcgcgccctgatagtcgttcttcgccatcttctgagcccgcttgatggccttggccttcgccgcgcccttgagaccggcgaaatcggaggccttcggctcgcgcacgatctgcatgcccatcatcgacagcaggccggagagcatcgacgtgtgaatgccgcggtcgtcccacgagcagcacagcgaatgggccgcctgctggttgatcggcagctggcgtaccgccagatcggggcgggagaccggctgcggggagccgaccttgaacttgagttcgcggcacatctccgtcagctgattgaccaggtccttccactggcgtacgcgcagccagctgaaatactcgctcttgcagatacggcgcagcgcattgttgctcggctcgccatcggcctggaagatacggtcccagatgttcagcgcggtcagatagtcgctggacggatccgcataccggttgtggatgcggtcggcctcatcccgggcctcgtccgggcgttcacgaggatcctgaaggctcaggaacgccacgatcaccagcacggcagccaacgtgtcgggcgtgctggatttcgcggcctcgatcaccatgcggccgagacggacatcgatggggatgcgggcgagctgccgtccgacatgcgtcagcgtcacctcgccgcgcttgcggccgatcgccttgagctccgtcagctcgttgaagccgtcggagaccgccttcatgtccggtgggtcgatgaacccgaaattcgtcacatcctcggccgtacgggcgacgcccaccgacagcatgtgcagcaccacggcacccagcgatgtgcgcaggatctccggctcggtgaaccgagggcgggtctcgtagtcctcacgcgaatacaggcggatggcgatgccgtccgcgatacggccgcaccggccggaccgctgatcggcgctcgcctggctgatcggctcgatgggcagccgctgcaccttggcggtcttcgaataccggctgatgcgggccgtgcccgggtcgaccacgtagcggatgcccggcacggtcagtgacgtttcggccacgttcgtggcgatgacgatgcgctggtgcgtgtgcggctcgaagacgcggtgctgctccttggacgacaggcgggcgaacagcggcatgatctcgatggcgtcggggtggcgcatgtcgtcggcgcgcgggccgtaatggcggcgcagcgcgttctcgaactcgtggatgtcgcgctcgccggaggcgaacacgaggatgtcgcgggcgccgcgctcatggctggaatggatgatgagctccgcgcacgccctggcgaccgccgtgggcatgtccatgtcgggttcgcgagatgagccacggtcccggccgccgtcggagggcgccgccgacagttcggcatacgattcctcgccgggcatcgcgccggtctcgaatccgggcacgtgccgcatcagcgcgggcgcggtgcccagcggctcgtagacgacctgcacggggtaggtgcggccggagacctcgatgactggaaccttctcgtgcagcgcatgctcgaaatgctcctgaaacttcaccgaatcgatggtcgccgaggtgatgatcagcttcaggtcgcgacgtttcggcagcagcgcggtgaggtatccgagcaggaagtcgatgttcaggctgcgctcatgcgcctcgtcgatgacgatcgtgtcgtattgccgcagctgggggtcgcgctggatctgcgccagcaggatgccgtcggtgacgacgcgcagccgggtcttcggcgacgtctcgtcggtgaaccgcacctgatagccgatctcgtcgcccagatggacgcccatttcggaggcgatgcgttcggcgacggttcgcgcggcgagcctgcgcggctgcgtgtgcacaatctgccggccgtgcgtaccgcggccgagctccagcaggatcttcggcagctgcgtggtcttgcccgaaccggtctggcccgagacgatgacgacctggcttgatgacaccgccttggcgatgtcatcgcgagccgccgagaccggcagctcggaaggatatgtgaatttcatccgtttacttgttcctcaacacttcaatgacgcgatatcccttcgcggaatgatacttcgacacctcataatcgtcgcccagcgcggtggcgagccaggggatcagcgagtcggcgcccaagtttttctgcaccaccaggtacgcggcgcctgcgggggtgagccgcggcagccacgtcatcagcaggtcgtgcagcgcgtccttgccgatgcggatcggcgggttcgaccagatcgcgtcgaacgtcagatcggccggcacctgctccggcgacgcggcatggatgtgctcgcagccgttggacttggcgttggcgcgggtcaggtcgagcgcgcgttcgttcacgtccacggcccagacgtcggccttgggcgaggcgaacgccagcgcaagcgacacgggtccccatccgcagcccagatccagcagcgtccccgtctccggcggctccggcacctcgcgcagcagcaccgacgtgcccagatccaggcgcgagccggagaacacgccgttcgacacctcgaccacggcatcctgcccgcgcagcgtcaccttcatgcgacggcgaacgtcctcggaggacggttcggcggcgaaatactgttcggtggcgttcccgtcccgcttcgaggcgtccgaggcatgctgcgttttcattcgttctcccgcatatagatgagtgatggcttccgacttggaaccatgatagtcaaaggcatggttagcgggggagggctgcggattcctatgccttcgagagcgctgcgcctcttcgagaatgctttctggcgcaattatccggtagatatctaccgcagtgacattgcgtggtgcacaatgcaattgtcgggcggatggattccgccatcaatggcgaaaggatgggatcatgagtggtgcggataaactgggatacctgattcgtgcgctttcgaggacgaagcgcaaggattacgagaattacgtcgtcaatgccatatggaaccggttggcgatgggcgatgtcaagccggtcacgcaacagctggtgttgtggcctgacgggcgtcggtctttcgtggacctgtattttcctcaggcgatgatcggggtggaatgcgatgaggcctatcatcaggggcaacgggaacgtgaccgcgagcgcgagataaccatcacggatgtgctgcgtcagattcgcggcgaggactatcgggcgttgcatgtggatgtttccggatcgtatgagcaggtggagcgatccatcgacgactgcgtgcggcggatacgtgcagagatcgaacggcgcaggcaggcgaacgagttcacgccgtggacggaagcctatgtcgattacaaggagttctacaagacgagggacgccgtcagtgttgcggatgacgtcggatttccccgaatcgccgacgcggtcaacacgctgtgcggttccgagtacaagatatttcagaaatcctggttcgcccccagcgtgatgcgccaatggtacggcgaccgatatcgagtctggttcccgaagctcgccataggcgggaaggccgtggcaaacggttggaacaaccggctgtccgatgacggcacctatatctacgaatacaacgaggacgccgatctggtggatccggtcggcgcgacggcgaccccaatgacatccgtataacgttcgccaagtccgccgacccggtgacgcggattcaggcgtatcgattcgttggcgtgttccgccggatctcgaacagcgaggacggaacacggaagcggtaccagcgcatcgaaaccgtcttcccgattcatcgcacgccttgtctgccaatccacagataatggcaagcgtttggagaacgtcgttccgtactcaccatcgtgcatgcgatgcggatcacctgcgatgcggaccaccgtggtgtggttcatgcctgcaggggcgtttcgtgtcggatgccgagtgacagatgtcgagtgacggataccgagtggcggatgacgagcagagagcatgagtgacagcagaggtgccattgagccaacagaataccgttgatgcgaatcaggccggtcagccgggcgaacaggaagagccggtgctgaccggtgtgctggccgaccagtcggacgtcctgctggacgagaacggcgatgggcatgtcgggcaacgggacgccgaggagtgggaggagcgcgaatcccgcaaccagctcaagcatgtcgcgggtctcggggagctgcaggacgtcaccgaagtcgaataccgcaaggtccgccttgagcgtgtggtgctggtgggcgtgtggtccagcatgaccaccaccgcggctcaggccgaggagtcgcttcgcgagctcgccgcactggccgagaccgccggagcggtggtgtgcgatggtctgctgcagcatcggtacaagcccgactccgccacatacgtgggttcgggcaaggcccgcgagctggccgacatcgtcgccgtgaacgaggctgacaccatcatcgtcgacgatgatctgccgcccagccagcggcgtgcgctggaggatgccaccaaggtcaaggtggtggatcgcaccgcggtgatactcgacatcttcgcccagcacgccaccagccgtgaaggcaaggcacaggtggagctcgcgcagcttgaatacatgctgccgcgtctgcgcggttggggcgggtcgctgtcgcgtcaggcgggcggccgtgcggccggggccgacgcgggcatcggatcgcgaggcccgggcgagacgaagatcgagatggaccgtcgcgtcatccggagccggatagccagattgcggcgccagatcgcgcagatggccccggcccgtgaggtcaagcgcggttcgcgtcgacggtacgggctgccgaccatcgccgttgtcggatatacgaacgccggcaaatcctcgctgacgaatcgtctcaccggttccgcggagctggtcgagaacgccctgttcgccacgctcgacactgcggtgcgtcgagcccgggccaaggacgggcgactgtacgcctacgtcgacaccgtcggcttcgtgcgaaacctgccgacccagctgatcgaggcgttcaaatccacgttggaggaggtcgccgaagccgacatcatcctacatgtggtcgacggttcgcaccccgacccgttctcgcagattgacgccgtcaacgacgtgctcgccgacatcgaaggggccgaggagataccgcgcgtcgtcgtgttcaacaagattgaccgaatcgatgcggccacacgcgagcggctggcggcgctcgaaccggaggcgagtctggtgtccgccgccacgggagagggtcttgacgacctgctgcggcgcatcgaatctatgctgcccgttccgggcgtgcacgtgtctgcgctgctgccctacgacgccggttcgctgctgtcgcacgtgcgcgaatacggcaacgtcgattccgtcgactatcgcgccgatggcatatggatcgaggcggatgtggaccgccgactcgccgcccagatcgtcgatagggcgatcgatgagacggacggtgatggcagcgatcacatcgatgccgagcatgatgtcgattgagtgttctacccattgccgctgacgcaatgtctgtgagcgttcacaacaatgtgacgcaaatcaccttgccttcggggcgataatgactacggcaatcagcgcaaacgtcatcatgtgtagatacagtaagtgtgttgtcaaaatgaaccccgccaaacacggggcactgtgctaagagaggtctagcaaacatggtggattcacccattaagcccacaaagctcgccatcgtcggtgccggcgcagtcggttccacgctcgccttcgccgccgcccagcgcggtgtcgcccgtcagatcgtcctcgaagacatcgccaaggagcacgtcgaagccgaagtcctcgacatgcagcacggctccagcttctaccccaccgtctccatcgacggttccgatgaccctgagatctgccgtgacgccgacatggtcgtcatcaccgcaggtgcccgtcagaagcccggccagtcccgcctcgacctcgccggcgcgaccatcaacatcatgaagtccatcatcccgaacatgatgaaggtcgccccgaacgccatctacatgctcatcaccaacccggtggacgtcgtcacgcacgtgtgccagaagctgtccgacctgccgaccaaccagatcttcggttccggcaccaacctggactccgctcgtctgcgcttcctgatcgcccagcagaccggcgtcaacgtcaagaacgtgcacgcctacatcgccggcgagcacggtgactccgaagtcccgctgtgggcctccgccaccatcggcggcgtccccatgtgcgactggaccccgctgcccggtcacgagccgctcgatgccgccaagcgcgaggagatccaccaggaagtcaagaacgctgcctacaagatcatcaacggcaagggcgccaccaactacgccatcgccatgtccggcgtcgacatcatcgaggccatcctgcgcgactccaaccgtatcctgcctgtcagctccatgctgaaggacttccacggcatttccgacgtgtgcatgtccgtgccgacgctgctcaaccgtaagggcgtcaacaccgccatcaacacccctgtctccgaccgcgagcttgccgccctgaagcgctccgctgagacgctgaaggaaaccgctgcccagttcggcttctgatatcggattgattgacggggcgccggtgcagatcggcgcatgaaccgccctcagtcttgcttcgcgccttgccatgctggcgcggctgtcggtcaggagccggcggtgctctcatcttgcccccggcgggaaggtcatcgagtgaagcgagactgggggtggttttgtttatcggcaggggtcctcctcgtcctggtattcgcccgcatctgctcacagagaacgtcggcgcgccgttcgattcggtgtatagtgaaccctgttgtttgaaaacctcggcttcggccgaggttttcgtcgttctagggctattgaaaatgattgtaggaaacagtttcacatagcaggcagaaggagaggtacactatgccgcacacgcatggaacggtgaacgaggtgacacgcggcagcaaggcgcaccagcgacggcttatgatgacgctgaccttgaccggcacggtgttcgtggcggagatcgtcggcgccatcatcaccggatcactggcattgctggtggatgccgggcatatgctcacggacatgtcggtgttgattgcatcgacggtgacggcggtgcttatgcgtcgaaagcccaacagctcccgcacctggggttgggcccggcttgaggtgctgaccgcggaggcgggagcgatgatcctgctgttcgtcggattgtatgcgctgatcgaggcggggatgcgactgttcggaggatccgccgaacatgtggcggacagtgggctgctgctgttcttcggcattctgggtctggctgccaatgtcggctcgatcatcatcctcgccgggcagcataacgacaacatgaacatgaaagccgcgttcctcgaagtggtgaatgatgccctgggctcggtggcggtcatagcgtcggccgtggtcatgatgctcaccgggtgggatggcttcgatgccatcgccggcggcctgatcgcgctgctgatgattccacgtgcggtgaagctgttgcgcgatgcgctgaaagtgctgctggaggagaccccggacggattgaatctcgacgaagtacgtacgcatctggagaatatccctcacgtcgtggccgtccatgatctgcatgcgagcaccgtgtccaccggcatgcccatgctcatggcgcatgtcgtggtggaacccggcatgagcatggatcaggcggcgaatgtgctcagccaactgcaggactgtctgcgcgaacatttccccatctcgattccccacaccacgttccagctcgaaccgcaggggtaccgttcgcccagcgccgaacagctgcactcctgaatgggacgccgcattgcgcggcttgatacgacaatgggttgggtgattgcctgaaatcgggcgattacccaacccatccgtcgtatcgagagtgtattgagttgcaaggtccgggacggttggctgcggtcagagtcgacgcagcacgctgacgaccttgcccatgatctgcgcgtgggtgccatcgatgggggagtatgcggggttatgcggtatcagccagatgtggccattgtccttgcggaacgtcttgatcgtggcctcgtcgtcgagcaacgcggcgacgatgtcgccgttgactgcggacggctgttcgcgtatgaccacgtagtcgccgtcgcagatggcggcgtcgatcatcgagtcgccgtgcacttcgagcatgaacagtttgccgctgcccgtaagccgttgcggtagccgcatgacatcatcgatgtgctgttcggcggtgatcgggacgccggcggcgatgcgcccgaccagcgggacgtcacgggatgcgagaatcgactcgctggcctccgtgtccccggggaaagggagtaccgtggcggtttgcgagtccgtgccggaatcatacaactcgatggcgcggcccttgttggcgctgatatgaagatagcccttgcgctccagcgcatgaagctgatgcttgaccgatgacgggctcttcagcccgacagcttcgccgatttctcggaaggacggagcgaatccctgttccgcaatgtgcttgcgtatggcatcaagcaccagatgctgcctttcggtcagggcgtcatcgcgttgccgcgtggcgtttttcgaggtgggtgctggtgtgctcacgtcgactcctttcatcttcgttcaatcatagcgtgatttgttccgtgaaaacaaacattcgttcgatatggcgtgttgcttttgtcgaaccgctgtgtcactatgagtacagttgttctatgaaacatgagttcgagaaggagggtgacatgatggaacaaatgattgcagcagcggggctccagtgtgcatcgagtcgtcatgatgcgatgcgcgatgtggcgttcgatgtcagaaacagcgatgttccaaccttttcgaggaatatggattcttccgatgcgcaacggcgtgattcccgggtgattatcggagtgtgcgacgagcatagtgttcgcatggcgaagaagggtcattcgaccatgtgtttgactcttcgcggcaagatcgtgttctcgatgatgggcgccctgctgtgcctgtgcatgatcggcctgctgatgccgcaggtcgcccggtcggcgccggatccctccgcagtgtacagctataccgtgcagccgggggacactttgtggtcatatgcctcggccatcactcctgatgggggcgatgtgcgcgacaccatcgatgatctgatatcgctcaaccatctcgatggtgtctcgttgcaggtggggcagcagctcaaggtgccgattgtctgattccggcgaattcggagcggtgcgtccccatgagtgctttttcgaatcgcttcttcggaattttccgccggccgcttccggattcggatgtgaccgttgacatggggaaggggctttgtcaacgcttacgatattctgaggtcatgcattgtccttattgtcagaattccgataccaaggtcatcgatacgagaatcagtgatgacgggttctcgattcgtcgcaggcgtgtgtgtcagatatgccacaaacgcttcaccaccgtggaaagcaccatgttgttggtgcgcaagcgttccggaaacgtagagccgttcgaccgcaagaaggtggtgtccggcgtgaggaaggcctgtcagggacggcccatcaacgaagacgatctacgcacactcggtcagcgcgtcgaagaggatctgagggcgagggggcttgccgaagtcgattcggacgatgtcggcaaggcgatattggctcctctacgggagctcgatgaggtcgcctacctgcgattcgccagcgtgtatcagaattttgatggtcttgaggacttccagcgagccatagacgatctgcgcaaggaaaagcacatcgaggcggaacagcactgaaacggaacggtgctgaagtgaagcagtgctgaagcggaactgcgctggtcgaaactgcactgacacgaatcaatgttgatgtcgatgccgacgtcgacatgtgacgcctgatatgcgaccggccccttccgtgatcgaacagcggaaggggccgtgtggaaaaccgatgaccggcttgttcagctgatcacgcgcatgcgaatcgtgccctcgatgtggctgagcgcgtccagcgtggtctggctgggcttctgcgatacgtcagtgaccacgtagccgagttcgccctcggttccgagagactgcgcagcgatgttgatgttctcctcgcccagcacatggttgacgcgggcgagaacgcccggcaggttggcatgcaggtgcgcgattcgagcagcgctcttgcacggccccaacgtcacctggggaaggttgaccgaaagcatggtcgaccccttgtcccagtagtcctcaagtcgctgcgagacgaaatgaccgattgacttctgcgcctcaagcgtcgagccgccgatatgcggggtgagaatcatgttgtcctcgtcggcgagatcggtgtcgaacggatcgccgctcttcttcggctcgacggggaacacgtcgaccgcggcgccggaaagatgaccggaatccagatgacgcttcaacgcgtccaggtcggcgacgaagccgcgggacaggttgatgaaaatggcattctgcttcatgcgggcgaactggtcctcgccgaagaagccagtgttggacttgcggccgtccacatgcagggtcaccgcatcggactgctccagcagttcgtcaagggtctcgcaacggtgggcgttgcccatcgccagcttctcctcgatatcgtagaacacgacgcgcatgcccagagcctccgccagcacggacaactgcgagccgatattgccgtatccgatgatgcccaaggtcttgccgcgaacctcatgcgagccggaagcggacttgtcccacaagccatggcgcatgtgatgcgtgtgggcgggaatgcggcgcatcaggcagatgatgtcgcagatcaccagttccaccacggaacgggtgttggaatacggggcgttgaacacgccgatgccatgcttgcccgcataatcgagatccacctgattggtgccgatgcagaagcatccgaccgcggtcagggacgggcatgcgtcgatgaccgctgcggtcacgggcgtcttggaccgtatgccgagcaggctcacgccgtcaagcgcctcgatgagttccttctcgcccagggcgcccttgcgcgtctccacttcgaaaccgtgatcgcgcagcgattgcgccgcatccgggtgaatgttttccaataacagagcttttgccatggtacctaccttatagctgcaaagctgtttcgtcttcccttgtccgcactataaccaatcgctgcgttggtctggtcatagccacgtagagatccgaagccgccaccaggcgcgagggagcatcctgctcgatacgtccaggctgtacgaccactacggcgtcgaattcaagtcccttgaccgactccgtggaaccgacgctgatctgcgcgtcccactcgtgctgctcggacagccggttcgtctcttgctgtcccagcgtacccggaagcgttgaaaagatagtggatcggagcgggtcgagcatgtgggcgggggcgatgaccgccacgcgaccggttccgtccgcatccacgaactgcttggctagctgcgcgacatgcgatgccgcggtcgcgatcgtgtcggattcgccgtcgacgatgatcctgcgcacggcgtccggtatcgtgcgcacggcgttgaccgtcgagatatacagtcccgccttctgcgcgaagtccgaggccaggtccgaaacctcctgcggattgcggtagttgatggtcagctcgttgagatcccaccgccgctcgccgaacagccggttcatcgtgcggtcccagcggcgcgtgccgccgagcgcagacgtctgagccacgtcgccgacgatggtgaacgagcgcgacgggcaccggcggatcagcatgcgccagtccatcgcggtcagttcctgagcctcgtcgacgaccacatgcccgtatgtccactcgcggtcggccgcggcacgctgtgcgatgaactcgccgccctcgccgttcatctggtcgaccagcatctgcgaggagacgatgcccgacccgagacctaccgagttcagggtgtcctgcgcgaactgctcctcctgggcgcgcttcgcgttcttggcggcgatctgcgccgcgatcttgggatcgggccccagaagctccatggcctcgtccagcagcggcacgtccgattgcgtcatcggggcgcccttggggcgggtgagcgcggcgatgccgtcgtcgtcaagccacggcgcgagcgcgcgaagacggagcggatgggaccacaggttgtcgatcagccacgtgccgttcatcggcagccacgcgaggttcagcgcgaccctcaccttgtcgttcaggcgaaggttcgtcagcgcctcgttcagctcgtcgtcggacggcgtatagtccagctgctcggcgtaacggtcccgaagcgccatcagcatggtccgcacgaaggtctcccgcgccttgttgtgcggctggcgcgtgcgcttcgcctggtcgatggccgccctgacatcggtgtcgagcatgcggaccgcgaagccgttcacgtgcacggtgggcaggtcctgcggaacccgttcgcgcagcgcgatggcgttggccacgacctgcgccattcgacggtctcccttgagcttggcggcgagcggcgtgtccgtcgcggtcgccttgatgcctgggatgaggtcggcgatggtgcggctgacgacgcccgtctcgccgagcgagggcagcacctggtcgatgtagcgcaggaacgtcgtgctcgggccgatgaccagcacgccggagcgctccagcttgcgccggtgcgtgtacagcaggtatgcggcgcggtgcagcgcgaccgcggtcttgccggtgccgggcccgccctgcaccaccagagccctgttgagatctgagcggatgatgcggtcctgctccgcctggatcgtggcgacgatatccgtcatcttgccggttcggcgcgaactgagcgatgccagcagggcgccttcgccggtgagcgtcccggccttcgaggccttgtccacctgctcggaatggacgtcgagcacctcgtcctcgatgccgatgacatcgcggaagttcagtgtgatatggcggcgcatgacgatgtcgccgtggttggatggcgtcgcctcgtagaacgggcgggccgcctcggcgcgccagtcggtcagtatcggctcgtggttctcgctggacaggccgatgcggcctatgtaccggcgctcgcctttcacgtcatcgagtcggccgaacaccagacggtcttccatggcgcgcagctgggtgagccggtcctcgtacatggtggcgaacgagtcgcgttccgtgcgctgggtgggggacccgtgcgagccggccgcacgtaccgtatccaaccgcgtgcgcgtctgcgatcgcagggcgtccaagcgggcgtatgcgcggtcgaccgcttgctgttcctcgtgcagttgcgttgataatcccggcattgatgtccgttctctcggtgaaaactcaggcattcaaatgtagcgcaagggcaatacgaagccgtgtggatgtgtcctgccgcaacggcgctccgaagcggttgtggaggatacgcattaaaactatgtggaaaaaaccatttcgtggggatttgtggtgagaagtggggtacagtggtggattggtgtatccggattcacggttaggaggtggaacgttggcagacgactcgcaagtccagaacgccacgaacccctccgcacagccggagccgatggccctgcccccgctgttgctgggcacgtacaccccgaaaatcgacgcgaagggccgcatggccctgcccgccaagctccgttcccagcttggcgcgggactcgtcatggcgcgcggccaggaacggtgcgtctacctcctgccgcaatcggagttccgtcgcatcgccatccagatccagcacacgtcgatgggcgacaaggccgcacgcgactacctgcgcgtgttcctgtccggagccgtcgaccaagacccggacaagcagggacgagtgctggtaccgcagatgctgcgcgactacgcgaacctcggcgacgacatcgtggtgataggtgtgggcacccgcgccgagatatggaaccgcgaggcttgggaacgatatctgaacgagaaggaacaaggctatgccgacatagccgacgacgtgcttccggtggtgggattctgatgactgattatgcttcgattcaccagccagtactgcttgagcagtgcgtgtcgctggtcgccccggcgttgcaggaccccggatccatcgcggtcgactgcacgctcggtctggccggccacaccatcgccttcctcaaagccgcgcctcaggcccgcgtgctgggcatcgaccgggatgcggaagcactcgccatggccaccgagcgcatcgccggggaaggactttcggaccgcttcatacctgtccacgccgcattcgacgcgttcggccaggtgcttgacgaccagggcatcgatcgggtgaatgcggtgttcatggatctggggctgtcgagcctgcagatcgatgagacggaccgcggcttctcctacgcgcacgacgcgccgctcgacatgcgcatggacgtcagccagcccctgaccgcgcaacgcgtcctggccgagtaccccgagcgcgagctggtacgcatattccgcgcatacggggaggaacggttctcccgccagatcgcccgcgagatcgtgcgccgtcgcgcgcaggaacctctgacgacgtccgcccagctcaacaggctcgtcgacgaggtggtgccgcaggcgcaccgtcccgccggaaaccctgctaagcgcgtgttccaggcattgcgcatcgaagtgaacggcgaactggacaagctcgccggcaccctgccgcagatagcctgccggctcgccccgaacggccgcctggtggtcgagtcgtatcactcattggaagacaagacggtgaagtcgttcatgaacgaaggactgcgcgtggacgcgccggccgacatgccggtcatccccgacgacgcgcagccgttcttcgcgccgctgacgcgcggcgccgtccaggccgggccggatgagatcgcagccaatcccaggtcggcgtcggtgcgcctgcgcggcgtcgagctggtcagggccctgcctgcgcgctggcgccagcgcttccggcacgacgcgcaagtcgcccgggaccatgagtcggcccgggacgcgggtgaaaaccgcggcagacacggcggccgcggcagacatgacgacatgacggcacgaaacacgacatcgagaaggaggggatgatggcctcgacattgcgaaccgcccgctccaacgcggcgcccgcggcaccggcggggcgcggctcggatgacgccgcacgccccgctgcccgcccgcagttgcacgtcatcgacggctcctcccagcgcaacggctcccggtccaccggcagcctggcccgtatcatcgcctggacccaggcgcgcggcgcgtcactgatccacgtcacggtcgccatcgtcttcctggtcgccacgctgctgataaccctgatgctgcgcacgcagatggttcagaactccttcgaatccaacacggtgcaaaaaaacatcaacatgctcacccaggacgtgcaggacgatcaggcgaaacttgacgagctgatctcgtcgctgcccgacaaggcgcagaagatgggcatggtgccccagcaggattccgtcaccatcgatctcaacgggtacaaacccagtaaggggtccgctcaatgatcggccgaataaccgcaatgatacggttcgccagatgccgcaagttcctcttccagtgcatctccatcggcgtcatactcgcgatggtcgcctccgcatgcctgttcaagctggcctccatccagctgatagacggccagatggccgcacaggcggcgacccaggcccggaccaagaaggtgatcgtccactcgatgcgcggcaagatcaccgacacgaacggcaccgtgctggcgcagagcgtcgagcgatacacgatcatcgccgacccgtgggcggcctcgcagttcgagccgatcgactgcgacacgcagaaggcgaagcaggccggattctgccacaaggtcaacggcaagccggtcggggtcaagggatccgcgggcgtggcccgtctgctggcacccgtgctgaagatggacgcgaagacgctcggcgccaaactgaccggcaccagccggtacatgatcctgaagaaggacgtgacgccgacggtcaagcgggccatcgacgacctgaatctgggtggcgtggtctatggcgagttgagcagccagcgcatctacgccaacggcacccagctcggcgcgctgctcggcggcgtggacgattccggcaagggcgtcgccggggtggaaagcatggagaactccgcgctgaccggcacggacggttacgtcatctaccagcaaggtaacggcggcgaggagatccccggcacgctgaccggttcccaagaggccgtgaacggctccgacgtggcgctgacgctggaccatgacgtcgactggtacgtcaagcaggcgctgctggaaggccagaagaagaccaaggcgacatgggccatggcggtggtccaggacatccagaccggcgagatactggccctggaggacaccgacgaataccaggcgggcagcgaccaggccaagctgaacgcgtcccgtgccgtcagcgaaagcttcgaaccgggctcggtgggcaaggtcatcacgatgtccggactgctgcagaccgggctgcacaaggcgaccgacaagttcactgtgccctattcgtacaccaaggacgggcaggaataccatgactcgtccgcgcacggcgacgagcactggactctggccggcatcatcaagaactcctcgaacgtgggcgtggtcatggcttcgtcgcagtacacgaagaagcagcggtacgagtacctcacgaagttcggcatcggccagtccagcggcatgtccatcccgggcgagtcgcgcgggcagctcggcacgccggaatcgtgggacgggcgaaccagcaacacgatcctgttcggccagggatactccgtgaacgcgctccagctgaccaacgtcgtcgcgaccatcggcaacaagggcgtgcgcaagcagcagtcgctgatcaagtcggtcacccacgccgacggcacggtggagacgccgcaggagggctcttccacgcgcgtcatcgacgagtcggtcgccgaccaggtcaagaacgccatggaatccgtggccgagggatatagcaaggtggtgaacgtcaagggataccgcatcgcggcgaagaccggtaccgccgaggtcgcgggaagcgacggccggctgacctcgatcgtcgccgatttcgccggaatgatcccggcggacaacccgcgcttcgccatcaccgtgatcatgaaggacccgcagggcacctacggcggcatgacggctggcccggtgttcgccaagattggtgaattccttatgcagaagtacaacgtgccgacctccagcccgcgcaacgatgctattgcagtggactggtaaggggccgcgccggaaatccggcggggcgtcgacaaggaacatacggaagaaaggcggaagcgatgagcgcagtcagtgaagccgtcgcgcggcggatgacgttgggatatctggccgacacgtacgggctggaactcgacccggacttcgcttcgggcgtcaccgtcacatccatcgcggacgacgtcgattccgtggctcccggatccctgtatgttcccgcgcagagcgtggacgtcaagcggctggaggaggcccgggcccgcggcgcgtacgctgcgctggtccccccgtcgatgaagcacgaggacggccccgcgcagatgccactgctgcgcgcgcgcctgacgtcccggcagctgggcgacatcgccagcgacatcgcgggcaccccgtccaacgcactcgccattttcgtggttggctcggatgacccgaaacgcagtgaacggtacgcgtcatgcgtagcggatttcctgcacatgctgggcaatcctgtcggcgtcgtgaaatcatccggctcgacgtcgctggagcgcgagctcgacctgacctacccgctgtcgatactcgacgtgcagcagacgctgtcggtctgcgcggaggacggcgcggcggcgatggtgttcgcgctcaacgaccgtacactcaaatccgatgcgctgaccagcgtgaacgtcgacgtcatcggcctggactcggcgcgagacctgcgccagccgacgccgagcggcaccggcgaggattcgcgtgctggcgaaggcggcgaagcggcatctccgtccgggcagtgggcgagcggggaggagcccgccgggtcggctggcgacgcccgggacgacctcgcacaggcgcggcagctgggggcgggcttcggcttcgaggtcgacgagcagacccacgtcgcccgtgccgacgcgcaatccgacctgctcgcggcgcaggccccgttcgcctcggaccgcgacagtatccgtgaattgtcgctcgccattgccatggttatggcggcggggattcgcagaaacaacattcgcagtgcgctgcgcgtatctcacgaattggctcatggagaggaaaacaaggcatgaacgcagaggcaacgatgatgcctatgaccgttcggcaggtggccgaggcggtccaaggcaggctgatcgtcccgcagacgggcgacggcgtcgaagacggagccgatgcactggccacgtcggcggtcagcgattcgcgccaggtccgtgaaggctccgtgttcgtggcgatcgccggcgagcgtgtggacggtcatgatttcgtcgctcgcgccggcgaatccggcgcggtcgtggcgctcgtacaacatgaagtggatgcgccggtggcgcagatagtcgttcccgatacggtcgacgcgctgggcctgctcgcgaaggcgaacatcgccgctcggcgtgcggccggaacgccgttcaccctgatcggcatcaccggctcggtgggcaagaccaccaccaaggacctcatggccgccctgctgtccacgctcggctccaccgtggcgcccgtcggctcgttcaacaacgagatcggccttcctctgaccgcgttgaaggtcggccgggacacgcgcttcttcgtcgccgagatgggagcgagccatgtcggagagattacgcgcctgaccacgatcgcccctccggacatcgccgtcgtgctcaaggtcggatgcgcccatctcggcgaattcggctccgtcgagcgcatcgcgcaggcgaaaagcgagatcgtccaggggctggttcccgatgggctggcggtgctcaacgccgacgacgcccatgtggcggcgatggcccccctggcgccgcaaggacacgtattctggttcggcatggccggcgacgacgccgaagccagcgccggcaacgccgcatccgggaagtcggacgcactgttcgccagcgacgtgcggaccgacgacggcgaccgcccctcgttcaccttggaacgggccgatggcggaaccgcccatgtgcaactggcgattcgcggcacgcacaacgtgatgaacgccctcgccgcggcgagcgtcgcccacctgctgggcgtgccgctgcagtcgatcgccgagacgttgtcgcgtcagtcccgcatcagcccgcaccgcatggcggtgtccacggtccggcgcggcgggatgtctttcacgctgatcgatgattcattcaacgccaaccccgactccatgcgagccggtctcgacgggctcgcccggtggcgttccgatgcagacccgtaccgtatcgcggtgctgggagcgatgctggagctgggtggtgacgagtccgcgctgcacgagggcatcggcgagtacgcggccggcctgcccatcgacgccgtcatcgcggtgggcaacgatgacgagcatttcgacgcgctggcttccgcccttgcgaagggcgcgcggaagcggcgtgacgacagtgacggcaacacgccggaggtgcattgggttcacgacatcgatcaggccgacaccttggtccgagctcttgccggagaccatgacgacacagttgtgctgctgaaggggtcgcacgcctcgggcctgagcgccctggcgcaacgatggacgacagcggacggacagccgtccgaccacgaataggaagcggggaatctgagttgatcgcgttaatcattggcattctggtctcgcttctggtgaccatcgcgggcacgccgatgctgatccatctggtgcatcggctgcactacgggcagtacatccgtcaggacgggccgaagtcgcatctggtcaagcgcggcaccccgaccatgggcggcgtagcaatcgtgctggcgatcgtgctcggatggggggcgtcggcactgtaccgttacgtccgctcgggagcggttccctccctgtccgcgatgcttgtgctgttcgcgatgctgtcgatgggcctgctcggcttcatcgacgacttcgccaaggtgcgcaaaaaacagaatctgggcctgtcggtgcatgccaagttcatcggccagttcatcttcgccacgatctacgcggtcctcgcgctgatcatccccaccaaatcggggttccccagcgctcaggcaggcatgagcttcattgagaagccgttcttcgacttccggttcgccggcggcgtggtcgccgcgatcatattcgtcatctgggtgaatttcctcatgaccgcgtggacgaacgcggtcaacctgaccgacggccttgacggcctggcatccggttcgtcgatgatcgcgttcgccggatacgccatcatcgcgttctgggaaagctaccatatcaagggcggcacgcacgaagggttctcgtatgcggtgtccgatccgctcgacctgaccatcatcgcctgctgcgcgaccgtcgcctgcttcggattcctgtggtacaactcgaacccggcgacgatcttcatgggcgacaccggttcgctggcgctcggcggcctgttcgccgcgctgtccatcgccacacacaccgaattcctcgccatcatcatcggcggcctgtacgtaatcgaggtgatgagcgacatcatccaggtcacctcgttcaagctcacgcacaagcgcgtgttcaagatggcgccgatccaccatcatttcgagcttctcgggtggagcgaatcaaaggtcgtcgtgcgcttctggatgatcgagttcctgttcatgatcgtgggcctgatgatgttctacgtcgattgggtgtcccgatccgggttgctgtttgtctgaacggtactgtgacggctccgcgccgcacagcgtggcgtgaccgccgcggtataggcaggttcgcatgagagcgtccgccggttcggcggtgcaatgacaagggagacgatatggatctcagtgacaagaccgttctggtggccggtctgggtatatccggccgcagcatgatggaagtgttgcgttcccgcgcagcgcgggtaatcggcgtggacgagcataagccggaggccgacctgcattcgttcgacgacatcgactgggattcggccgacatcgtcatgacgtcgccggtgttcaacccgcgcacgccgttcatcctcgaagcccaacgccgaggcatccccgtgtacagcgaggtcgagctcgcgtggcggctgcgcgtggacagcgcccgcaccggccgccccgccccgtgggtgggcatcaccggcacgaacggcaagacgtccacgaccgagatgacctcggccatgctgtgcaccgatggcctcgttgcaccggcggtcggcaacatcggcaaggcggtgtcccacgccgcggtcgatccggacaacgacgcgctgtgcgtggagctcagctcgttccagctgcatttcaccgattcgctggcgctggattgcgcggcgatcacgaacatcgccgacgaccatctcgactggcatggcggcatcgaagcgtacgccgccgacaagtcgaaggtgtttcgcaacgtcaggcgcgccctggtgttcaacgccgacgaccggcgcgtcagcgcgctcgcctcggcggcgcataccgccgagggatgccggcgcatcggattcacactcggcgttccccagcccggccagatcggcgtggacgacggctggatcgtcgaccgcagtggcgtggccggcggcgcattcggcgatgagacccgcctggcgccggtccaggagttcccccacctgtgtgagccggacggcaccgtgtacccgcacctgctcgccgacgcgatgaccgcgctggcgttggcgctgggaatgggcgtggacctcgataaggcgttggctgcgctgaaggcgttcgcccccggcggccatcgcatccagacggtggcgacggcggcgacgggcgacggcggctcgatacgcttcatcgacgattcgaaggcgacgaacgcccacgcggcgcgggcatcgctgagcagcttcgcccccaagagcgtggtgtggatcgccggaggactcgccaagggaagccgttttgaacagctcgtggcggatcaggcgcatacgattaaggcggccgtcatcatcggcaaggaccagaagccgatgcttgaggcgttcgccgccagcgcacccggcattcctcttactgtgatcgagtccgagccctcggacacggtgatggcgcgcgcggtcgatgccgcaggcgcatacgccggcacaggtgacgtggtgctgatggcacccgcctgcgcctccatggaccagttcgtctcctacgcggaccgcggcacccagttcgcgcgggagtcctcacgatgggtgacgcagcatggcaagtgacgatccgcggcgacgcacccgctccgtaagatccggccagccttcgcggtcggatgctggttccgcgggcgcgggcactggcacgggcagacgcacggggcaggattcgtccgcctcccgactggccgaagctcggcgggtcgaagagcgtgacgcccaacggctcggcaggttcaccggactgcgcagcctgctcaacccgctgtggtgctatcacggcttccgggccgccgttgtggtgctcaccggcttcggcgtgatcatggtgttctccagttccaccgtgtcgatggtctccgccggccgatcgccgttttcgcaggccatcagccagggcatgtactgcgtgatgggtctggtcgtgggcgtggttttcatgtgccttccggctcgtatgtacaggcgtttcagcttcgccgtggtgttattcgcgatgctgctgcagctgctgacattcacgccgctcggcgtcgaggtcaacggcaatgccggctggatcggcaagcgcggcgtgttcacgatgcagccggccgaggtgatgaagctcgccttgtgcatatggcttccggcggccctacactgggcgaagaaacacagcggtaagatcggcaagttgcgggcatacgcccccctgacggttctgtatctcctgtgcctgggattcgtgatgctgggcaaggatctgggcacggccatgatcgtcctgttcatcggattcgtcgcgtttcttttgggaggatatccaggcaaggtccttgcggcctttgccgccctgggcatcatcggcatcgtgggattgattgcatacagtccgaacaggctgaaccgcgttctggccgcgtaccaggagtgcagcggcaccgatgcccaaaaggtctgctaccagtcgatacacgcgaaatacgccttggccgaaggcggtctgttcggggtaggcttgggcaactcccgcgagaaatggaactatctgccggaggcgcacaatgatttcatcttcgccatcatcggcgaggagaccggtttcatcggagcggccatcgtcatcatactgttcgtggtgctgggaggatgcatgatcagcgtggccctgcagaccgcggaccgttacgcgtcggtcagcctgctgtgcatcaccgtatggcttgtcgggcaggcgctgatcaacatcggcgtcgtggtcggggttttccccgtcatgggcgtgccgatgccgttcgtctcggcgggcgggtcgtccctgatcatgtgtctggcggcggccggcgtggccgcctcgctcatgcgcgcccaacctcagatcaaggccgattcgtcccgcgcctgaccggaggcggggctgtcggcgaagccagctggggtggccataaggcccttccaacagggcgaaatatgtcaaagtcggcttgacgaagccgcgttttttcatcactcacgctaagctcggagattatgagttcatcacctgtgcatatcgttctggcaggcggcggcaccgccggtcatgtcaacccgttgctggccgtggcggatgcgattcgccgtatccggcccgaggcttccatcagcatcatcggcacggccgtaggactggagcacgaccttgttccccgtgccggctatgagctggacaccatcgaaaaggtcccgttcccgcggcgccccaacaaggccgcgctccagtttccggccaagtggatgcgcgagacccgcaaggtccgcgatatcctgcgttcgcgtcacgcggacgtcgtggtcggattcggcggctatgcctcggctccggtgtattccgcggcgcacaggatgggcatacccgtcgtcattcatgagcagaacgcccgcgccggcatggccaacaaactcggcgcgcgttacgctgcgttcatcggtacggcgtacgagaacaccggcctcaagccgggatccgggtgccgtatggagcgcgtcgggctgccgttgcggccggcgatcagcacgctcgcggcgcagttcgcgtccgatcgcgcgtccgtgcgccagtcgggggccgaggcgatgggcatcgacccagcgcgtcccatggtgctggtcaccggagggtcgctgggcgcggtcagcctgaacagggcggtggcatccagtgccgcggtgctgctcgaacacgcgcaggtcgtccatctgaccggcaagggcaagatcgacgaagtgcgctcgttggtgggagagcgcgccaatgccggggtcttcaccggtgtgggccctgattcatacggcaagggcgactatcatgcggccgaatatctggaacgcatcgatctggcgttcgcatgcgccgacctggtgatttgccggtccggggcgggatcggtgtccgagctcgccgccctgggcctgcctgcggtgtatgtcccgttgccgatcggcaacggggagcagcggttcaacgcgcttcccgtggtcaaggccggcggcgggctgatggtggccgacaaggatttcaccgcgcagtgggtgcagtcccatgtgccgtcgctgctcgccgaaccggaccggctgcgcgagctgggcgacaaggcatgggagtacggcattcgcgacgccgccgacaccatggcccgtcgcgtgcttgaactggcgtaatgcggcgctctgattggcgtcgggtatgaccataatggtgaccagcatgaatcatcaaggagaatctgcagtgtctgaagcgcaaaccaatgccacccctatcgtcctcgacccgatgagggtcgcgttcgcgcccgacgcgacggtgttgcaactgggaaggacccatttcatcggcatcggtggcgccggtatgagcgtgctcgccgaaatgctccatgagcgtggcgtcgacgtcgacggttccgaccgtgaggaaggctcgaagaccgaacggctgcgatccctcggcatcaccgtcgaaatcggccagcaggccgacaacgtgcgtggtgccgacaccgtggtgtactccagcgccatcaagcccgacaaccccgaaatcgtcgcggcgcacgagcggggcatccgcatcgtgcatcgcagcgacatcctggcgttgctgatgaacggccgccgggcggtcaccgtcgccggagcgcatggcaagaccacgacaagttcgctgctatcccacatcctcgtccatgccggaaccgggaagctggccgatcccagctacgccatcggcggcaccatccaggcacccgggggagcggtactggacggcgggcatgccggacgcggcgacgtattggtcgcggaggcggacgaatccgacggcagcttctgcaagtaccgtccctcgatcgcggtgatcacgaacgcgctcgcagaccatctcgaccattatggcgacgaggcgcattactgcgccgcgttcgtcgaccatgcggggcatgcaagcggacatgtcgtcatgacgggcgatgacgagggtgccgtggccgtgctgcgcgacctcgacccgtccgtggcccgtcgaacgatcgtgtacgccaccaaggatgccgaccagatcggggacctgcgcggcgccacgctggtgcgcatcgatgccgagcatgagagcgccgacagcggccgggagaccttcaccgtccatgtgccggcgtcgctcgcatcggtctgcggctgcggcgacgccgatctggctttgccggtcagcctcgccatcccaggcatgcacaacgcgcgcaacgcgaccgcggccatcctggccgcgatgttgctgggcgtgacacccgaggccgcaacccaggccgcctcgacgttcctcggagcctcgcgccggttccaggtgcgcggtgaggagaacggcgtgacggtggtcgacgattacgcgcatcatcccacggagatcagcgcgctgctcgacgccgcccggcgtcggtacccgcgttccgtcatccgggtgctgttccagccgcacctgttttcgcgcacgcgtatgttcgcccacgagttcgccgaggcgctgtccaaggccgatgacgtcatcgtcaccggcatcttccccgcacgcgaactgcagcgggacttcccggacgtttccgccatgaccatcgtcgatgccgcgcaggacgtgccgcacgcttcggcgcagggcgacgggacgtggatcagcgcggtcgacgacatgcaggtggcggctcagatgctggcgatgcgctgccgtcccacggacgtggtgttcaccgtcggcgcgggggacattaccgccatgggcgcggtgatcctgcacgcactgggggcccggcacaatctcggtgaccgctgatggcacggcgggtcgtttcctcacatggcgatgccggtcgtgaggccgggcaagggtccggctcgcgcaagccgcgcacgacggcagacagggcctcatcgtcgggtgtcgaagccaatcgcgtcgccgtgacacgggaacgccagaccaggaaaaagcctcgcaccgcgtcgaatgacgtgtcccggaaggctgcatccggaaaggcgtcgccggggagaaccacggtcgggaaggcgacgggccggcagatgacgtccggcaggaagtcggaaaaggccttagaaaaagagacttcccgacaggcaaagggcgggaaaacagtctcccgaaaatcgaggttcggaaagacggtgtcccggagcgtttcgtcgtcctcgtcccggtcggtatcacgcgccgaaggtttcgtcgacgcgcgtcgcctgcacagcgaggatgtggtcaagaagacgctcgatgagaacgtcggcgtgctcggcgtggcgacccgtcccaaagtgctggatttcgacgcgcgcctgaaggagcggaagaaggcgggcacccgggtcgccgccatccgcgtgctgattgtgatattggccgcggcgctggtgtccgcgctgatctggcttctgttgttctcatccgtgttccgtttggaaacctcgcagatcagcgtcagcggcggcaacgaatgggtgagcgagaaggatgtgctggatatcgcgaaccagcaatccggcaaatcgctgttcctggtctccgcagacaaggtcagctcgcagctgaagaacatccccggcgtaacccaggcgaacgtcgtcaaacggtatccgcgctcgctggagattgacatcaaggcgcagcagcccgccgccatgctcaaggaaccagatggaaccctggtggcggtcgaccgcaaggcccgcgtgctcaacgcggtgggcaaggcgtccatgaaaggtattccggtcatcgaggtgagctcggtggacaacggcctgaacagccgcgccgtcaaggaggcactgaccatcctcggcggtctgcccgacacgatgcgcaccgtcatcaccaaggtgagcgcgaaaacgcaggattccatcaccaccgagctgagttccggcaaatatgtcgtcgtctggggtgattcgtccgagttgaaactcaagtcggcgatcgtcgacaagctgctcagcgacccatcgctgataggagacaagcatcagatcgacgtgtcggccccgagccgacccatcatcaaatagcgcgcgtttcgccgtgggcaggacgcgaaacgcgggtgaagatacgaaaagggccgcatgatcgttggaatcatgcggcccttggagtggagctgcggggaattgaaccccggtccgatgaccgaaccctcagtcttctacgtgcgtagtctgctggccatatggcggtttttctgcccccatcgatgtcgcagacaactgatggcgggcatatccgcagttaaagtccccgaatcaccctgtggctcaatgattcaggcgagtcttctaaacgacgctcagcatccccccgaagacgagagggagtgaacggagcggctgctcactgtttaaccctggcgcgaagctcaggcagcgagagcgaactcagtgcggttagatttagcacttattcttttgcaggggacatccacgagcggaccctgcgttctcggcacgcttccctgcgacgaacaggtcaccgtcgaaaccgatcagccccgatattgaattatcaattcgcattccggttcatggccggacatttcattatatcccggctgctcgaaaaagcaagtcggtcatcagtcggtcacccatacgcgcttggtgccggtctggacgcgcttggttcccgtccgcacctttttcgtgccggacttgatgctctgcatctgatacgagccgtgatcctcctgccgggtcccggcctggatctgcttgtcctgccagaccttttcgtaccggtagttgtcggggaggccggacttgagcaggtagtcaccgtgctcctcgaacgcggggtcgttcgcgttcgcagtgaacccgtcgtgttcaaagatggcgcgtccggttggcgcctgcacacgttgcgtctcatagaccggccgggtctcccagtgcccggaggggccgccgttcgggccgctcctgtcgggctgtgcagtggaatcgagctgtgcggatttgccgtcggcattgtcggcatcggtgccgtccttacggatattgtccccggttgcttcgttcttgccaccggggccggacacccccccctcggtttccggagaggttccctgttctccggaggcgacggtgccggccggcttcggtggacgcggcataatcgcgtgttcgttcgcgcttatggtttttttttggggggggtatgccgtggtatgcccagttcggatgcggtggcggtgggtgcgatagaatccgatacatgaaagtggtattgcagcgtgtgtcgcaggcgtcggtcgatgtcgtcaatgagctgggggatttggatcccacgttcgaccttcagcagatcggtccggggttcctgctgctggtcggcgtgaccgatgaggacggcgatgacgagatcgcatggctggcgcataagattctgcgtctgcgcgtgttcgaggacgagcagggcaagatgaaccggtcgatccaggacatcggcggtgagatcctgtccgtgtcgcagttcacgctgttcgccgacgtgcgcaaggggaaccggccgagcttcgtcgacgcgggcaagccggaacatgccgacatcatgtggatcaaattcaacgaggcgctgcgctccgggggcgttgcagtacgcgaggggcgtttcggcgcccatatgcgcgtcggcctggtcaacgacggcccggtcacgatcgtcatcgacaccgccgaccgccattgatcggtcgggccgcggctgcgccgtcaccgtgcgagggtaccgtcccgcgtgacggtgcccgtgacgcaacccgtgcaacccgcgcggagtattgccgtgtccgtgtcggttctcgaatatgcgaaaacccgcccgaccggctgccggtcgtaaccggtcagtcaatcgggcgggctctgcggggcggtcagtcagcgccgaagtgccttgaccctatcaggcttccacgggtttcttgccgctttcgagcaccctgtaggcgaagccgacgacgagtacgtagaggcagccgatggccatcacgaggatgccgccgaactgacccgcgacgtcggccgcggcacccatgatgggcgggaagatcgcgccgccgatcaggcccatgagcatcaggccggagatctcgttctgacggtccggacggtacatgagcgcgtgggagaggaacagcgagaacacgttcgagttgccgaagccgacgagtgcgaccgcgacccagaacagccagaccggcggattggtcggcacgagcgtgaagatcgcgaagcagatggcggagagcgtcatgatgacgccgcagatgcgcacgccgagcttgttgctgatcttctggagcacgatgccgccggtgaagcagccgatcatgcgggcgacgaagtacaccatcgtcgcggaggacgcgatggctgtgaacgtgtcgccggtgtgctcggtcaggatgcgcggcgcctgcgcgttgatggcgacgtccacgcccacgtgcgccacgatgccgaggaagcacaggagcacgatgcggtcggagaacagcagcttgaagcagcggccgatggtagtggtgccggcgtcaggcgcgggctcctcgatcttgtcgaacgcgagcagcacgtagccgaggatgccgacgatgaagtagatcacgaacagtatccaccacatgccgacctgcttgccgtcagcgttggtgtaggtgaaggcggagatgctgttcgcgccccacatggcgatccacggggcgaacagggaggcgaacgccttgacgaactggccgagggtcagcgtggaggcgagcttatcacccttgacgaacacggtcagcagcgggttgagcgacacctgcatcagtgtgttgccgatgccgaggaacgcgaaggagatgacgatgagcaccagctgcacggtggacttcatcgggcacagcaggtaggcgatgatcggcagcgccatggcgacgagcgtcaccaggatggaccacagcacggtcttgcgccgcccgatcttgttcatcaggatgccggtgggcacggagaagatcaggaaccagaagaacaccatggtggtgaacaggttggcggttccgtcggcgagaccgaactcggccttcacgtagttcgtcgcggtgccgaccaggtcgacgaagcccatgacgaagaaggcgaacatgacaggcaggatcttggcgaatcccgcgttgactggcttggtggtttcgttgctcattgcgatgtttcccttttctctgataatgagctgtgattatttgatcgtcggtgcatcctgcgggcgtgtcactgcgcggcctgcgcgaggtagtcgggcatggtgtccgggtactccggccaggcgccgttggcggtgcagacgtacgcggcggtgttcacggccttgcggtgcgcctcggtcagcgtgtcgccgagcagcgtacgggcggtgaacgtgcctgagaaggagtcgccggcgccgacggtgtcgacgacctcgacgtgcggggtggccagcgtggaggactcgccgttcttggagatgatggtggagaacgtggaaccgccggtcaggataacgtagtcgaggccgtactcgctcatgaaccagcggcaggcgtcgtcgtcggaggtgccgcggatgtcgaacatgtcgcgcaggagcagcagttcggcgtcgttgatcttgaagacggtcgccgcttcaagcagctcctcgatgagctccttggagtagtggtcgccgcgcaggttgatgtcgaagaacttcattgcgcccggcttggtgtgcttgagtagctcgatgatggtgtcgtgggtctcgggggagcgcagggccagcgtgccgtagcagatggcgtcggcctgctccacgacctcgatgagctggcgggtgagcagcaggtggtcccaggcgacgcccttgacgatggtgtactccgggatgccgttcttcaagctgacctcgacagtggaggtgggccatgcgttgcgctggatgatggagtggatgccggccttctcggcttcggcgagcagctcgtcgccgagcgcatcctcgccgaccgcgctgattgaccagccgtcggcgccgttcatcttcgcgtggtaggcgaagttgacgggggcgccgcctgcgcgctttccgctgggcagcatgtcccacaggagctctccgagagacagaacgatgggcttggtcatgatggtttcctttccgggatggttgctgtggttgttgtgttgttgtgttgctgcggggtcctccgttgtggggaccccggaaatccgtgatgttccgcgggcggtcacgacagttcgaagaactgtgacgggtggtcgaggaactggttgatggctacggccgcggcgccgttcagggcggcgtccgcgggcagggcggacagggtgatggcggtggtgtcgttgagctcgtggatgacgtgcttgtcgatgaccttgtgcacttcgtcgagtaagagctgcccggcttcggcgacgatgtcgccgatgacgatctgcgaggggttgaaggagttgaagatcgtgatgcagccgaaaccgacgtaccgtgcgacccgcttgatcagtgcgatcgcgcgcttgtcgccgccgcgggccagtgcgaacagcgctcggcatgcctgcaggtgggtcatcgtgccggcatcggcgatcagatcgtcttccttcaggatcatctcgtggatcgcgggggtggagcagtagcgttcgaggcatccgacgttgccgcagtcgcacggcttgccgttgatgtcgatgctgacatggccgatttcggtggccgctccgagggcgccgttgatgatgttgccgtggtcgatcacgccgaggccgacgccttcgccgacgaggtagtaggcgaggttctcggtggtgatggtgggatcgaacaggtattgggccatcgcgccggcgcgggcgtcttgctccacgaacacggggacggtgaacgcgttgctgaattcgtggatgaagttgactttctgccatccgcgcatcgaggacacgacggcggtgcgtcccacgttgcgcaggtaggggccggggacggccatgccgatggcgatgatgcgtcggtcggcttcgatcagcgaaccgatggtgtcgtggagctgcatgatcgccgagtcgatggtgtcttcggtgacttggggcagttcctgcacggtcagcggtttgccggcgaggtcgaacacgccgagctgtaccaggcttcgcgcgaatttcacggcgatgacgtggaattctgcggtgtcgagagtgagcccgatggagcggcggttcttgcgcccctcgaaatcgccggtctccttgatggcgccgacttctatgagcttggcggtgatcttggtgatggcggcgggggtgaggtcgagggctttggcgatctgcgcgcgagagctgatgccgtgctggtacaggtgctgcatgatccgcgaacggttggtttcggacactgatgccagggttgcgttggcgatggtgttggtcatcactgctccttcgctgtcgtgccgtgtgcgcggtcgttgcgtgttgttgtcatgctcgtcattgaatatgaacgatgtttatatattaacactgttaatcaaaaaaagggaggcgcgccgttgttcggcgtgtcgcgccttgtcccacggtttgcgcgtgtcggggcgtgggatggttcgggtgccctcgtgcgggatggtacggtgatagacaaggtatgtgacgcatcgaaggagatgacaatgacggttgaaatcgcggtgcaggacgtggagggcgcccgcatcgcacatgaggagggggcggatcgcgtcgaactgtgcgccgctctgatgggcacgggcgggctgaccccaagcttcggcatgatccaggcatgctcccatgtcggcgtaccccaaggcgtccaggtgctgatccgtccgagaggcggttcgttcgtgttcaccgatgaagagaaatacgtgcagatcgccgacgtccgttcggccatcctcgccggggcgtccggcgtcgtcgtcggaggcatgaccgaggacgggcgcattgacgtgccgttcacccgcgcgctggccgaggccgcccgcaacgaggccgtgcgctgcaatcgcaaggtgcaggtcacgtatcatcgtgcgttcgacatgctcgacgatcagttcgccgcgctggataccctgatcgaacttggcttcacccgcgtgctcacctcgggtggcgccgcatgcgtcccggatggtctgggccgcctgcgggagctgtccgaatacgccgcggggcgcatccagatacaggccggcggcggtgtgaccgtcgatctcattcccgccttgaaggagacgggcgtgtcggcgattcatttgtcggcgaaacgcacgatgacatcggatgggggccccggaggcggagacaatggcgtcatggtatgccgcaccgatcgggatgtcgtgcgtgccgcagtcgccgccgcgcgctgaaaatccaaatcctcccgctgacgggaggtggcgcgcagcctgatcagcggttttccaggtaatcgtggagaactgatagggcttcgccacgcagggtgatttcgccctcgcactcgcatcggcggatgatggtccgcgtgtggaacgacgagccggtcagcaggtcgagctgcgcctgcgcggccgacagcagggtgtcgttgacgatgtcgctctgcccgtacacgcacacgtcggcaaggtccagcagtcccacgggcatggacagcgccgtgcccagataggtgccggcctcgcgcaggatgctcgcgcgcatccgttcgtcgctgcgctgcagccgtgcgtgcagcgaggtcgccgagaccaggcgttcgaggcaccctcgcttgccgcaggcgcacggagggccctgcgggtcgagggagatgtggccgatctcgccgccggcgtggttctcgccgaacaccggcacgtcgcccagcagcacggcgcctccgacgccacggcgcaggcggacgaacatcatattggggccgcccttgccgaacagtcgctcggtgaacatggcggcggtcgcgtcgttgttcacggtgacgggaagtgagaaacgccgttcgatgggcgtgcggacgtcgacgttgcgccagccgagcagcgtggagcgcttcaccaggccgttgccgtcgaccacgccgggcatggcgagcccgatgccgatgacgttctgcgtggcggcgtgcaggggagtgatgacctcgttgatggtgtcgaaatccacatggttcaccgcccgcagcgcgtgttccacgtgcatgaccggctcgccgagcaggttcgtggcctcgccctggatgagatgcggctgtgacaggtcgatgctgatgatatgcagcgtgtcggggtcgacgctcagcagcgtgcctcgcttgcccttgccgccgttggactcgcggccgttctcgcgcagcaggtgacagctgagcatgctgttgaccacatcggagaccgccacgcgggacagtcccgtgcgccgccccaattcggcgcgtgaaagttggacgtcggggaacagcaggctgaagatcaatgaccggttcgtgcgtcttgcatcggcgggacttgccttgccgctctgtcccgggttgtgggggccccatatcccggattgctggtaagcggtcataagtccctggatcctttccgtggctctccgcgagaccatttccggtcacgcaatgttcattctacggtcgctcatgttcaatgtccgttgtgtcgccgaagatgcggatatacacattagttagtatcattaacaaatagcggatgcgcatgtcacgggaaacgcaagaatcgcgtgacggcacggctggtcgctgatgacaacggggtggccgaaccgctgaagaatgaacaacacaaggaggttgcacatgcctgaagtgattatcgtgaaggatcaggatgaggccggcgagctgtacgcccgctgcgtcgccgatctgatcaagggcaagccggacgcggtgctgggtctggcgaccggttcgagcccgctggccgcctaccgtcacctcgccgccatggtgaaggccgaggacatcgacgtgtcgaaggtgcgcggtttcgcgcttgacgagtacatcggtctgccgctgacccacccggagtcctaccacagcaccatccaccgcaccgtcgtcgagccgctcggcctcgacccggagaaggtgcacgtgcccggcgacgtgctcgacggcgccccgctggaggacggcgagcgcatcgcccacgccggccccgagtacgatgcggccatcgaggccgccggcggcatcgacgtgcagatcctcggcatcggcaccgacggccacgtcggcttcaacgagcccggctcgtcgctggcctccggcacgcgcgtcaagacgctggccgagcagacccgcgtcgacaacgcccgcttcttcgacgacgacatcaaccaggtgccgacccactgcatcacgcagggcatcggcacgatcctcaaggcccgtcacctggtgctgctggccttcggcgagggcaaggccgaagcggtcgaggagacctgcgagggcggcgtgagcgccttctgcccggcttccgctctgcagctgcacccgcacgcgacgatcatcgtcgacgaggccgccgcctcccgcctgcgccacaaggactactacaagtacgccttcgagcacaagccggcttggcagggcatctgatcagcgccctgacaggcatatcgatatgcgctcccgaaccggggcgcatgacggatgggttccccgtctgggggacccatcctcgcatggggcggtcatcatcgcgccccgaatcacatacaaagaggtaggacaatatgactcaatcacgagaacagatcgtcgcgcgggtgactgatgcgctgaagggcgaggcgggtcgcgtcgccgttcgcggtgcccgcaaggtggatgcgtgcggcgtccaggatcatttctggctgaccgcggcggacggtgtcatcgtcgccaccggcaccgacgacgaggcgttcgagtcggcgtgtcgttccatcggccttgatccggccgacgagacggccatcatcgatgcggccgggcagctgatcaccccgggctatgtggacattcacgcgcatggcgcatgggagcattccttcgatgacggtccggaaggcatcgacatcgcgcgtgccggccacgccgtgcacggcacgaccaggcaggtgctgtcgctgatcaccaaccccatcgacgtgatctgcgcgaacctgaagaacgttcgcgccaagatggacgagcgccccgacgtgctcggtgcccatctcgaaggtccgttcctggcgctcgcccgcaagggcgctcatgatcccgagtgcctcaaggacccggttcccgagctcgtcgacgagctgctgggcgctgccgacggctgcatccgccagatcaccatcgcgcccgagctgcctcacggcatcagcgccatcaagcagttcacgaaggcgggcgtcgtgccggccgtcggccactgcgacgccgattacgagaccgccaaggccggtttcgacgccggcgcgggcatcatgacccacatgttcaacgcgatgaatggactgcaccaccgcaagccgggcccgatcccggcggccgtggaggatccgcgcgtcactatcgagctgatcaacgacggcttccacgtacaggacccgatggtcaagctgggcttcgagttcgcaccccaccgcacggcgttcgtcaccgacgcgatggcggccaccgactgccctgacggcccgtacaagctgggtgcgctggacgtgaacgtcgtcgacggccacgcccgtctggtgtcgaacggtgcaatcgccggctccacgctgctgcttgaggtcgccgtgcagcgcgccgtcaatgagctgggcatctccccggtcgacgccgtcgaggctgccacgctggcgcccgcgcgcgcgttcggctacgacaagccgaacgcggtcaccggcgccccgctgggtctgctcgcgcccgggtacgccgccgacctgttgctcaccgatccgtccagctggacggtcaaccaggtgtggtgcgccggccgcaagctgaagtaaggcgcagccgcaaggcgttgattgcattcgtcacgggaaactgtgataggtcgcgatgagggccgtctgcatatgcaggcggccctcatctcatgtacagccttgtcgcccccacctcttccggtctcataatgtgggcattgtgtggcggatgtcgcaaaataccggaatagttgcaattccaagggttattcggccacaagccgcgcccttgcacatccagccgattcgtatggaaacacatggctaacacaataaccccatagtcttggtgaccgtgccaatgaagacggcgcggagagtagttaaggaagaggtatttcccttgaagaatcatcgcaagtttttggcggctgtcgcatccatcgcggcaatcgcatcgctgaccgcatgcggcggcgtgaaggacgccaatacggcgagcggatccgcgatcaccatcggcaccaccgataagatcaccagcgtggatcccgcgggctcttacgacaatggttcgtatgccgtgcagattcagattttcccgttcctgtatgcacaggattacaatacgtccgaattgagcccggatatcgccgccgatgacggtacatggaatgatgacggcaccgaattcaccgtaaagatcaaggaagggctgaagttcgcgaacggtcatgacctgaccgcatccgatgtcaagttctcgtatgaccgcatcaagacgatcaacgacgcgaacggcccgagctcgctgctcgccaacgtcgaatccgtcgaggctccggacgataccaccgtcgtgttcaaggactccgtgccgttcgatgtgacgctcaagcaggtcatgtccagcccggccggacccatcgtcgacgaagaggtcttcgacgccgacaagctgactgacgccgacaccatcgtcaaggggaacgcgttcgccggcccgtacaagctcaccgcgttcaagatgaacgagaccgcgtcctacgagaagaacgacagctacaagggcctgaccccggccaagaacgacgccatccaggtcaagtacttcgccgacgcgtccaacctcaagctcaacgtccagcagggccagatcgacgtggccttccgctcgctgaccccgaccgacatcgaggacctgtccaaggactccaaggtcaaggtcgtcaaggggccgggcggtgaggaacgcttcctgaccttcaacttcaagatccagccctacggcgagtcccagtccgacgccgacgccaacaaggccaaggccgtgcgccaggccgtcgccaacctcatcgaccgcgatgagctgagcaagaaggtctacaagggcacctacaccccgatgtactccttcatccccgacggactgtccggccatgacgacacgctgaaggccgcctatggcgacggtgagggcaagcccgacgccgccaaggccaagaaggtgctggaggacgccggcgtttcgaccccggtcgacctcaagctccagtacaacggcgaccactacggctcctcgtccgccgacgagtacgccgccatcaagtcccagctggaggccgacggcctgttcaaggtcgacctgcagcagaccgaatggacgcagtacaacaaggaacgcgtcgtcaccgaagactccgacggctcgtacccggtctaccagctcggctggttcccggactactccgatccggacaactacctgtccccgttcttccgcgacggcaacttcgtcaacaacggctactccaacaaggaagtcaacgatctgatcgtcaagcaggcaggcgagaaggacgccaccaagcgtgaggagatcctcaagcaggtccaggccctggagaccgaggacctgtccaccatcccgctgctgcagggtgcccaggtggccgttaccggaacgaacatcaagggtgtcgtactcgacgcctcgttccgcttccgctacgcatcagtgaccaagtcctgatccagtcccggctcccgccgacgcggggcgacgcccgtgaagccggtcatggatggtgcagttgacgccaagccatccatgaccgccgcgggcgatcccacacgccgcgggagcatcatccgtattcgatcgtttttcccagaaggagcatcgcgtgtccgaaagcgccacggcgtcggcacctgcgaagacgcagccgaaagccaagaaaaaccgtttgtccagtgggtttttccgtttcgtattgaccagattcctgctgatcatccccactgtattcattctcgtcaccatcgtgtttttcgtgatgcgtgccaccggcgacccgatttccgccgccatgggcggacgcctgactcccgaagagctgcaacgccgtatccatgccgccggctatgaccgtccgctggtcgtgcagtacctcgactatcttggcgggctgctgcgcggcgatctgggcaccacgctcaccgacaaccagccggtcaccaccatcctgacccgctacggggcggccacgttcgagctcgcgttcctgagcctgatcgtcgctctgatcgtcggcatcggactgggccgtctcgccgccaggcgccgcgaccacgccgccgatgcgggcatccgcgtgttcgccatcctgtgctatgcgacgccggtgttcttcctgggactgatgctcaagctcgtcttcgcggtgtggctcaacgtgctgcccccatccggtcgttccagcttcgccagcgacatgcaattccagaggctggtgtcgcccacgggcttctacatcatcgatgccttccagctgggtgacatgagcgtgctggtcgatgtgctgcgtcacgcggtgctgcccgccctcgcgctgggtctgctgaccgcaggcgtgttcatccgtctggtgcgcaccaacgtcatctccacgtacacgtccggctacgtcgaggcggcgcgctcccgcggcgtgtcggagggccgtctgctgtccaagcacgcctggcgccccgcaatgatcccgatcatcacggtcatgggcatgcagatcgcgctgatgctcgccggcgcggtgctgaccgagaccaccttcgagtggaagggtctgggattcatgctgtcccagtacctcaagcagcgtgacttcgtcgccgtgcagggcatcgtgatcctaatcgccatcatcgtcgccgtggtcaacttcatcgttgacgtgatcagcgcgctcatcgatccgagagtgaggtactgacatgaccgaaagcactgcaaccaaagtcggcgtgcccggcgacaagcggctcggcgacctcaaggtcaacaagccggtgccatggtacggcaagctgccggtggtgcgcgacctgaagatcgcggtcggctggcagaaggccatgctggtcacgggccttgtcatcaccggcgtgttcctgctcgtggcggtcttcgccccgctgattgcgccttacggatactcgcagatcaaggacgcggacggcgtgtcgttcccgacgcaggccgccccctcgtccaagcacatctggggcaccaccgtcggcggattcgacgtgttcagccgcacggtgtggggagcgaggaccgcggtcatcgccatcatcgtcgccgtgctgctgtcgatcttcgccggcgtgctgctcggcctcatctccggatatttcggcggatgggtcgaccgcgtgctggtcgtgatcgccgacgccatctactcgttcccgtcgctgctgctcgccattctgatggccatcatgatctccggcggccagtccggcctgtggagcggcatcctggcatcaggcatctccatcaccgtggtgtacatcccgcagtacttccgcaccatccgcgccgaagtggtgcgcatcaaggggtcggcctacgtcgagtcggcgaaggtcgtgggcgcctccacatggcgcatcatgaccaagcacctgctgaagaactcgacgcgcacgctgcccgtcatccttacgctcaactcgtccgaggcgattctgacactcgccggactgggcttcctcggcttcggcatcgagccgacgtccgcggccgaatgggggtatgacctgaaccgttccgtcgccgacgtcaccgccggcatctggtggacggccgtgttccccggcatcgccatcgtgctgatcgtgctgggcatcacactggtgggcgaatcgctcaacgatctggcggatccgcgtcttcgtgcccgcaagtccgccggcgaggtcatcggctccatcgaagacacgtccgtcgaccccagtgagaagccgagcgccgacaacgaggtgatcgcggagctcagatccgaaggcaagccccaggtcagtgtggagaaccctgccatcgcgcaggtgatggaaaaggagaccgaccatgagtgactcgaccaacgtcaaggacacgtccggcaatctagccgaaatcaagaacctcagcgtctcgttcatgaccgatgcgggctccatcaaggccatcgacaaggtgaacttcaccatcccgcgcaagaccgtggtcggcgtggtcggcgaatccggctccggcaagtcggtgaccgcccgttcgatcatcaagctgctgcccgagaccgccaccacgtccggtgcgatctacctgtcgaaccgtgccgactccgaacgtcttgacgtgctgagcctgtccggtgaggatctgcgccgcatgcgcggctccgaagcggccatggtgttccaggagcccaactcggtgctcaacccggtgtacaccatcggctggcagatcgaggagggcctgcgtgcccacggcatgaaagacaagaaggagcgccgggcgaaggccatcgacatcctcaagaaggtcggcatccccgaggccgagacccgcatcgactactatccccaccagttctccggcggccagaagcagcgcatcgtcatcgcgatggcgctggtgctcaaccccgggctgatcctcgccgacgagccgaccaccgcgctcgatgtgaccgtgcaggccgaaatcctcgacctgctgcgtctcgcccgcgacgagttcgacgcctccgtgctgatcatcacgcacaacatgggcgtcatcgccgacatcgccgaccaggtggtcgtgatgtaccgcggccatgtcgtcgagcagggcgatgtggaaagcatcttctaccatcccagccatccctacacccagcgcctgctggctgcggtgccgcgcatcggccagaagctggtcgtgcgcgatgtcgacggcaagccgatcgaccgcacgtcggattggcatgacgagccactggccgtcgaggcgaagggactgacgatcacgtaccccgggcacctgatgcagcccgacttcgtggccgtagacggcatcgacttcgcgatccaccgttccgaagtgctcggtctggtgggggagtccggttccgggaaatccaccaccggccgcgcgatagccggcctgcagaaagtgagcggaggctcgctcaatgtgctcggcgtcgagatgaacggcgtcagggagcgtgatttcaagcccaagcgtgccgacatcggattcgtgttccaggatccgggcagctcgttcaacccgctgatgaccatcgcggagaacgtcgccgaaccgctcatcgtgcaccgcaagtactcgtcggtcgctgacgcgaaggagtacgtgggcgacctgctggagatggtgcagctgccgagggcgtacatgagccgattcccgcacgagctgtcgggtggccagcggcaacgcgcctcgctggcacgcgcgctggcgctcaagccgtcgctgctgatcgccgacgagccgacgagcgcgctcgacgtgtcggtgcaggccaaggtccttgaactgttcaagaagctgcaggttgagatcggattcgcctgcctgttcatcacccacgatctggccgtggtggacatgctcgccgaccgtatcatggtcatgcacaagggacgcatcgtcgagcacggcgacgccgacgacatcatgcagcggccgagcaaccagtacacgaagaaactgctcgcctcgctgccggttcccgacccgcgcgaacagcagaagcaccgcgcccacctgcacgagctcctggccgccgaaaacgcggcctagccgctagccccagcaggattaccggttccgccccgctggcgggaggacacatatcgactccacgcgaacgtcgtatgggcgggcgtggtgcgactagtatagggaaggaattgtcagtcggttttcgaacggcacaggttttcgaacagtacgaaggagcgtcacacgatgagcgaagtcatcaccgagaaggacaaggaatacgaggcccgcgaggaggcgaacgcccccggcgcggatcaggcgatgagcgaccgtgtgaacaaccgttcgctgcgtcccaattccagcgccttcattgatttcatgaagaccggttgggacgccagcgaaccggagatcgagccgctcgaatcctcgaagttcacgccggcgcgactcgccgcactgggcaaggcgttccccggcgagcgtctggtgattccggcaggcagtcccaaggtgcgcaacaacgactgcgattacatgttccgcccggacaccaccttcgcgtactacaccggcctcggccaggattacgaggcgggtgccgtgctggtgctcaaccctctcgacccggattcgcccgaggcgaaggccggcaagacgcatgaggccgagctgttcgtcgccccgcgcgccgacaccgccacgcaggacttcttcatgaacgcccattacggcgaatactgggtgggccctcgcgccggtctcaaggaaatgaccgcgatgaccggcatcgagacgcacgacatcgcccagctggctgacgcgctgtccaaggacgtcggggccgaggccggtgcggtgcgcgtgcgcgtgatcagcgacgccgacccgcaggtcacgtcactggtcgaatcgatccgtgaggccaacggctataccgacccggacaagaacaacgcagccgacgacaagctgcacgagttcgccgccgaagcccgcatggtcaaggacgagtacgagatcggagagatgcgcaaggctgtccaggccaccaagcacggcttcgaccacatccttgcgaagcttcccgaagcgctcgacaagccgcgctccgagcgcatcctcgaaggcgcgttcaacgcggtggcccgcgaggagggcaacgcgctgggctacgatacgatcatcgcctccggcgagcacgcgccgattctgcactggatgcgcaacacgggcgtcgtgcgcaagggcgacatgctgctcatcgatgccggtgtggaggtcaacagcctgtacacggccgacatcacccgcacgttcccgaccaacggcaagttcaccgatttccagcgccggctctaccaggcggtgctggactcccagcaggccggcttcgaggccgccaagccgggcgccacgtactccgacatccatcacgcctgcatgcgcgtgatcgcgcagcgcctgcacgactgggggctgctgccggtggacgtcgaggaatcgctgtcgcccgaaggccagcagcaccgccgttggctcgcctgcggcgtggcgcaccacctcgggcttgatgtgcacgattgcgcacaggcccgctacgagtcgtaccaaggcgcgaagatcgaacccggcatgatcttcaccatcgagcccggcctgtacttccgcgaggacgacctgctgattccgccggaataccgcggtatcggcatccgcatcgaggacgacgtgctgatgaccgagaacggccccgaatggatttccgcgggcatcccgaagcagcccgacgacgtcgagcagtggatggccgacatggccgcaggctccaaggcctgattgttccgatacgatgccgcccctttcaacggggcagcatcgtcggttgtgcgcaatacaaggaggaatgcccatgccaacacccgaattcgtattggagttgcgcaagaagatcggccatgacctgttgtggctcaacggggtcaccggctgcgtgctggacgaccggggccgcctgctgctgggccgtcgctccgacaccggcgagtgggccatggtctatggcatcaacgagcccggtgagcagccggcggatacggtggtgcgcgagatcaaggaggagaccggcatcgacgcggtcgtcacagacctggtcgccgtcacgtcgtcgtcacgcgtgatcacctatgcgaacggcgacaatacgatgtacatggaccactcgttcctgtgcgctctcaagcccggcggcaatgccgagccgtatgtgggggacgaggaaagcctgaacgtgggctggttcgaactggatgatctgcccgagcccctggccgccagcactgtggagcggctgaagctgttccggcgctatctcgacaacaagcgccggggcgacgcccacgcgatgttcgtcgccgacggggtgcagcgctagcggcgggtctgtttgcgtttctaagtgcgcgccgaaacgacaagtgcgcgaacatagggacgcaaaccggcccatttgcgtccctaagtgcgcacggttgtcgtttcggcgcgcacttaaggacgcaaacgagcgctacacggtcgtcataggggctgaccggtgtgacgtgccgtccgtctcactcgtcttccatgtcggcgagctcatgcgccgggcaggcaagcgcaagcacggccgtggtcgctatgaacgctacgccactgaggatgattgcccgcatgatccatctcctatcgcgtggtcttctcatcggagagccgaacctttccttatcaagtacagaaccatataagagctcgtttcatgggtcaggtcatacgaacggtcaatttttggtgacgacttcgtgaattacgccgtcatcgtgcctgcgattggcgtcgcaatgacgcggcggcgacctgctgaccggatattgccgtcggcatatgacaggacgaccattagaatggcgtaacggaaccattgacgagcaaacgaggtcgatatcagcatgtcttttgagcatccgaaccgcaacaacgagtccatccgcgacgtggagcgcgacatcatgcgccgcccgccggagcacaacaccacgaatctggatctggaccggatgaacctcatgctcgacgtgctcggccatccggagcactcgttccgtgtgatccacgtcaccggcacgaacggcaaggggtcgaccgcccgcatggccgaggccctctgccgggcgtatgggctgcgcaccggcctgtatacgtcgccgcacctggaacgtatcaacgagcgcatcgccatcgacgggcaggagctgagcgatgacgatttcgtggacatgtgggatcagatcaaggatctggtcgccatcgtcgacgcgaagatggccgagtccggccgccccccgatgagcttcttcgaggtgctgacgtcgatggccatctggaagttcgccgacgcgccggtcgacgttgccgtcgtcgaggtcggcatgggcggcctgtgggacgcgacgaacgtgctggacgcggacgcggccatcatcggcccggtcgacatggatcatatgcagtggcttggcgacaccgtcgagcagatcgccaccgagaaggccggtatcataaagccgaactgcaccgccatcatcgggccgcagccgcatgaggagcgggtcatgccgattctgatggaggccgccgagcgcaaccatgcgacgctgatacgcgacggctatgagatggaggtcacggaccgcgtgcctgcggtcggcggccagatcgccacgctgcacacaccgaacggggtgtacgagcaggtgccgatcgccaagttcggcgagcaccaggcacacaacgcgctcgccgcgctcgctgccgcggaggcggtcatcccggtcaacgggccgttgaacggcgacctggtcgggcaggcgctgcagggcgtcaaggtgcccggccgcatagagcagatccgcacgtcgccgacgatcatccttgacggcggacacaacgtgaacgcggccgaggcgctgcgcaaggccatcgaggaaagctacgacttcacacagctggtcggcgtcgtcgcgatgatgggcgacaagcaggtggaggagtatctcggcgtgctggagccgatcctgagccaggtcgtcgtcaccgagaactcgtggcgcgaccgcgtcatgccggccgaggaactggagaagatcgccgtccaggtgttcggccgcgaccgtgtcatccgcgaggacagcctgccagacgccatccagaaagcggtcgacatggtggacgtcgaggatgagaccggagtcggctacggccgtggcgtgctggtctgcggcagtttcgtcaccgccggagacgcgcgcacgctgctcaaggagcggatgaacgccgacctcgccaagccgaaggccgagcgtgtcaatccctcggtgggcgagcccgagccgcgcaccggcgccggagaccctgcacggtccggggtggaatcggacgccgacacggacttcgccaccgatgcgaaccccgatttcaacgagaacgacttcggcgatttcggctttgacaaggccgccaaggaggctgccaaggaggccgccaaggaggcggatgccgccgacggcggtcccaagggcggacaggcctagtcgacatgtatctcaaggaactcacgctgcgcggcttcaaatcgttcgcatctgccacgacgctgcgattcgagccgggcatcaccgcggtcgtcggtccgaacggttccggcaagtcgaacatcgtcgacgcgctcacctgggtgatgggtgaacagggcgcgaagaacctgcgcggcacgtcgatggaggacgtgatcttcgcgggaacgtcctcccgcccgccactcggccgcgcacaggtgagcctgacgatcgacaacaccgaccacacgctgaacatcgactacagcgaggtgacgatcagccgcaccatcttccgcaacgggggttccgaatacgcgatcaacggctcggcctgccgtctgctcgacatccaggagctgttgagcgacaccgggctcgggcagcagatgcacgtgatcgtcgggcaggggcggctggacgcgattctgagggccgatcccagcggccaccgcgcgttcatagaagaggccgcgggcatcctcaagcaccgcaagcgcaaggaacgtgcgctgcgcaagttggcgaacaccgaaacgaacctgtcgcggctcgacgacctgctgagcgagatacgacggcagctcgggccgcttggccggcaggcgcgtatctcgcgcagggccgacagcatccaggtgacgttgcgcgatgcgcagagccgcctgtacgccgacgatgccgtcgccgcgatggcgaagcgcgacgcggtgcgcggcgagctggcttcggtgcgtcacgacctgcaggccgcgcaatcggagctcgtccgggtcaaggtgcgcatcgaacagatcgaatcgctgagcgcgcaatccagcccggcactcgcgcgaatcaaccagacctggcatgagatgtctcagatacaggaacggctgaaatcgttgtgctcactggccggcgaacgcggacggtcgctgctcgggcagctggtgacctctctcggcgaggaccccgacatgctgaacaagcgggcggaggaactggaatcgcaggcgcggcggcagtcggagacagtcaacgacatgcgcatcgcgctcgacaaggcgatacaggagcgcgccgacgacgagaaaaaactcgcctcggtgcggcagaccctggcggagctgcgcaaaagcgcccagcagcgcgacttgcagatcgcgaacctcaacgcgctgatcacccgcgaggaggcggccgccgaacttgcagacacacgcgccaaggatttcaccgcgcagcgcgaaacactccagacccagttgtcgcaggcgcgctcgcagtgcgagtcgttggaacgcgaggccgacaacggcgacgatgacggcggcaaggcgctggaacaggcgcgggccgatctcgccaagcggcaggaggcgcttgacgacgcgctcgcgcggcaacgggacgtcgacggttcgatcatcacgctgcaggccaaagccgacgcgctgcgcgacacgctggaatcgcgcaacgcctccggcgctctcgaacaggacgatcaggtggccgcgatggggcggctcgccgatttcatccacgtcgaggaaggctgggaggaggccatcgcccacgcgctggacgcgttctcgggcgccatcgtggtgccgggggagcgcaacctcctgcatgcgctgcgcaaggcgaagcaggatcgtctgggcaaggccgtgctcgtgatgtccgacgcggctgaaagcggtgccggtgccccggaacaggtggccgtcgctgaggagaacgatggttcgccatatcggacgccgtgtgcggccggcacgatggtgtcggcgaatccggatgcaccggacccgagccgagccgcgggggtcgtcggcgcggtgcggctgctgctcaacaacgtcgtcgcggtcgagacgatggatgaggccgtgcggatggtccacgacggcggatgggcgcaggccatcacccgcgacggggaggtcgtcaacccggtgggtgccgtgggcggttcatcactgtcgcaaagcgacctgtccttggcggcgaggcgggataaggcgctgaagcggattacggtgctgcaagggcagctggacgacatcacgcggcaggttggcgaggcccgtcagcggcgggaccaggggcgagtgctggtcgacaaggaatcgcagcggcgcattcaggccaagctcaagtccgaacaagccgcgaaggcgttgcaatcggccgagtcgcggatgaagggcgtggaacgtcaggccgcggcgatcgaggagaagctgcgcggcagtgtcgaggaacgccggagccatcagttgaagctcgacgatttgcggcgggcgctcgccgcgatccgggattccggcgcggaacatgccgacgtcgacgagctaggggagcgcgagcatcggctggaagccgcgttgaacgctacccgcgagcatgaggtcaccgcgaagatcgcgtggacggaggcggaacgcaaggtcgagtcgttcaagcggcaggccgggctgttgcgcgacaacgccgcggaggccacgcaacgacgcgcgcgcatcgaggccatgaacgagcgtcgcaaggcgcaggccgcgcacgcgcagcgcatcgccgacgatgccgcgcaggtcgcctccctggtggcggcgagcatcgacgatgtgatcgccaagcgcgaggcgctgcaggccgaggcatcgaaccacgacgcggagctgaagacgctgcgggcgcagcgcgatggcatcgagccgaaagtcgcgggactgcagcggcgtgaacacgagctggatgtggatcgcgaacgattggccggggaatttgggcagttgacgcagaaggtgtcggatgacctgggactttccatcgacgagctcacccgcgatttcggccccgagcggccggtgcccgtgctggacgagaacgggcgtcccgtgccgcgtgcggacgcttctgaacctgaatccgagtccgaaccaggctccgaatctgacggaggcgacgacccgagccggttcgaaaccgttccgtatgaccgtgcggaacagcgcaagaggctggagaaggcgaagcgcgacctcgccgcgctcggcaaggtcaatccgttggccggcgaggaatacgacgcgcttgagacccgcaaccaatacctgaacgaccagcgcaacgacgtggtcaaatctcgcgatgatctgatgaagctcatcagggatctggattccacgatggtgagcgtgttcaaatccgcgttcgatgataccgccgctgcgttcgagaagatgtttgccacgctgttccccggcggtaccggccgtttgcgtctcgacgaccccgatgacctgcttgccacgggcgtcatcgtcgaggcgagcccggccggcaaacgcgtcaagcagctgagcctgttgtccggcggggagcggtccctgaccgcgctggcgctgctgttcgcgatcttcaccgcgcggccgagcccgttctacgtgatggacgaggtggaggccgcgctcgacgacgtgaacctgacccgccttatcaacgcgttcaacgaactgcgcgaacacgcccaactcatcatcatcacccaccagcagcgtacgatgtcgatcgccgacgcgctgtacggcatcacgatgcgctccgacggcgtcaccgccgtagtcagccagaaactcagccgctgaccccacatcgaagaccaccctccggcgctgcacgccacctcccgccagcgggaggattaccgattgccgacccgctggcgggagggcaatcggccgtaggccgactgggggtggctgtgcatccggggatgtggctgttgctccgcccgaccgacctttttcgcctgcgccgactctagcggcggatggccttggcccggctgacggtgtcctccacgaggacggcctgggcgtcgatgatcggcagctgaggcagcgggaacgcctcgttgagcacggagagctcggtgcagccgagcatcagcgtatcgcaacggcacgtgccggccggatcgagcatcgcctgcagcaccgactcgtagcgctgcagattcaggtcgccggttcccttcacatcgtcgtagatcagtgacgtgatgcgctcctgcaactcgtcgtccggctcgacgaaggtgtagccggcctcctcgacggcctgacggtacacgcccgaagcccgcgagcccatcgtgccgaggaatccgacgcggtggaaacgctccttggggtattgcccggccatgtgcgcgacggcgccgcgcggcatgtgcaggatcggcaccggcgtcagcgactggaaatggtcgtagaagtaatgcgcggtgttgcaggtgagcacgatgaagctcgcgcccatcgcggtcgccttgtcgatgtcgtcggcgattatcgggaacgggtcatcgtcggactgcccgattatgaacgcggtccggtcgggcacggccgcgtcgttgaacacgacgtagtcgaggaactcctggtcgctgtgggcgtgcgtctcacggttgaccaaccggatatagctttccgtggccagcgtgcccatgccgcccaataccgcaaaaaatggtcgtctcataaatgtcgccgtcgattccgaaaagtcagtcgttcttgccgagatacgtgtcgtagttcttcgcggtcagccggtgcagcctccacagcagcagccggcgcctgaacgacaggtcccgcccgtagcgcagcgtccagccggatttgcccgcattgtgcagcgcgattccgcggtcaagcgcctcccccggctccgcgtacttcttgagcgtcgagaacggcacctccagcagcatgctgtcaccgcggccgatgaccgtgtcgccctccatcgggttgccgagcaccaggtcgtcgacgaaatactcggccaggttgaagccgttaagcgtcacgaagaagttcgtgcggccctggcgcaggttgatttcgaacagcttgtactctccgtcgcgcgggtcgaacttgatgtcgaagttcgcgacgccctcatatccgatgctttccaggaagctcttgatcttcaggcagaatccctcgttgtagtcggggatgatcgccgcgtagttgccgatggcctccggcgtcgggtcggcgagcagcacgtggccgagcaccatcatgcgcacatggtggtcatggtcgacgtaggcgttgagcacgcgcatgttggcgtcggagccggggatgaagtcctggatgatcagctcggagccgtagccggcgccgtagatcgcggagacgacatgggccagctcctcgggcgtgtgcagaatgaacgccttcttgcgtccggggaagtccacgtgcaggtattcgacgctgttcgccggcttgacggccacggggaagccgaacggcaggtcgtgatgcttgccggccgcggcaccggccttgtccagaacgaacgtgagcgggtgcggcaggtcatactgggcgcacagctcgtagaaggaggtcttgttgctcagacggtcgtgcaggtcggcatcgaccgacacgaacgtgaaatacggcttcagctcgtccttgtaccggctcagcagctcgctgtagtcgtcaccgcacgcgatgagcaggaacgtggtgtcgggtcgctcggacgtgagccggcgaccggcctcgaccatgtgacggcggaaggattccggctcggtgaagtccgcgaagaacgtcggctccataatcgaactgaatttggtgacggaaagctgcatacggccgtataccagcgatttcaggccatacgcgctgtggaacgcgcgggccatcgcgtaggcgcaggtttcactgccgagtagtacaggctggaaagccgtcattatcgatccttctgttggacgttcacgattgcttatgacattctacatactccgtgtggcgatgggaggccgtttcgtgcgcagagtgcgaagatgcggtcacgcgggccgttgcccctggcgcggggggacgatacattgaaataagacgtattctcccgatggaacgaggttggtcatggaagagacgacggcacggggattcgcggaacttcgtgaggcgttggcgtcccgcaccgggacgcggccggaggactggttcccggtcttcaaggcacggtacggcatgcaggtggcgttcgacgcagtgaggtcggttcgtggcgacggctcggtgctcacccagctgttcacctgctgcacggcggtcgatccgattgttgtgagcgggctgagaccgcggtatgcggatgtgggcgccgacacgatgggcattgacgtcgccaaggtggagtccatgccgctggggagcgacgagcaggtgcatgcgatggtgatgcagcatacgtttggcgcgatcgatgaggactcgtcccggcggctggccgcgctggcgggggagatgggggcgttgctcgtcgaggattgcgcccactgcgtgacccgcatggcccgtgatgctgcgggatggccgttggccgacatttccgtgcactcgttcggcgtggagaagatgctgccgaccagattcggcggcgccatctgggtcaatccgcggctgcgtgagcgggatgcggcgctggacgccgagacccgaggccggctcgccgcgctggagcagccgtcccatcatctggatacggtcacgaaactgtatatcaacgagaaccgcgtgctgtcgcgtctgggcggattcggcgggtggatgcgtgagcgactcaccgcttcgggctggtatgagccgccgatttccgacaaggagcgtcgcggcgcactggaatatgagccgatgacggtgacgccgtggatcgcacagcaggcggtggccggcatctccgcgctcgacgccaatgagaatgggcggcgcgcggtcgtgaccatgtatcgcgaggcttttgcgggcgtcgacgggttggacgttccggcagtggcgatgaacggcgaggcgcagccgctgttgcggttcccgttgttcgcgcgggataccgaggcggcggagcgcatcatcgccgcagcgcggcaggcgggtggctacgccgaacgctggtaccgccccgaactgttccccggcgtgaccgatccggccgcctatgggctcgacacgttgaaccgctccaccgtgccggtcagcgaccgtctggtctccaccgcgctatgcctgcccaccgaactgggtgaagacgcggttcgccgcgtcatcgacgccgtccgcgccgccgtctgaccaccggcacgtctgaccgccctctggcgcgcgcagcgggtgttcagacgtctcaccccgttgcaccgcgccgggaatcttacttcttgagggtgttcttcagtgatttggcgagcttgagggagctgtagaaggccttcttgatcggcacgtcacgcccggcggccaccggggtgatttcctcggtgaacttgcacttgaattcgttgaggccgttgaggctcggtgccagctcggagccgatgcccatcagatcgtattcggtgatgccctgcgagccaaggatgcagcactcggtgtacagcagcttgtcggtcacgtgcaggcgcatcacgtcgttgcgcatgccggcatagtagcgtaccgcgtgcgtgccgttgacggtcacgattgaccatgccaccacgcggccctcgatgcgggccgcgaacacgcggcaatgatccgcgcccagcgcctcgatcatgtcggagtagtcggtgatcggagcgggcgtgaatccgtcgcgcttgccggtctccaccatcacgtcgtagtattccgcgaagtcggcgatcgcctgcttcgtctcgtcggcgatgtcggccgggcattcgcgcagcgacttgcgtacgtcgcggcggccgcgacgcttcatgcgactcaggatcgcatcgtcgccgccggtcacgtcgatcaccacggtctggtcgtacggcacggtcgacagcaccggcacggtgccgtcggtgaaccacgtgtcgatgcggatgaacgccacgtgcctgtccgctcggtgcacttcggcggcgatcgcgtcgatggcctcgcgttccagcgcctcgtccggcttgacgatccagaccgggccgtgcatcgaacgcaggtaatggtatccgtgcgtctccatgtcgatgaacgcgatgaacgcgacggtctcgccgtctcgctggatcaggtacacgccccaaggagtgcggccggggatgtccgcctggaagcgtgcccacacgtcggtctgttcgatcggcagcgtcacgccggcatcggccgccgcctgttccatttgctggtagtcggttttctgtaacgtaatcatgcttgtcttgcttgtctttctatcggttcgtgcgctttggcggctcaggcgaacatgcgctcgacgatgcggtcgtcgccctcgaacggcacgtgcttgttgtggtccttgatccagcgttcgtcacccttgccgatgatgaggatgatgttgaaccggtcggcgtgcgctcgggcgtcgtagatcgcgttcgtgacggcggtcgggcggtcggagatgacggtggacgcgatgccgggcacggtgatgtaccgttgcatctccgtgcagatgtcgatgaacggttcggtgtccgtgtcctcggcggtgaagatgaagctgtcgatgcgatgctgcgccgcttcgacgatctccttgcgccggtcgtacgccttgttgccggccgagccggtgacaagcgtgatgcgcgggtgctgcgagccgaaccgctcgtcgacgaaatcgagcagcgcggtcacggaggcgtagttgtgcgcgtagtcgacgatcgccagcgtgttggactgcgggtcgtggaactgctccatgcggccggcgatgcgcaccggctccatcgcgtgcgtggctgcggcgtcggcggtcaggtcgattccggcggcatgcgcgatggccagcgccgctgccgcgttggcgtagttgaagtcgccgtccaacgccagacggaactcgccgagatcagcgccgtctgcggcgatacggtaggcgctgtgctcggcgttcgccgggcttgcggtgacatcggcggcatcggatccggcggggctctgcccgtccagcagctcgaacgtggtgaccggcacgccggcgtccgccgcgtcctgacgcagcaggtcggcatgatcgctggccgcgccgagcaccagcgcacggctgttgcgcacgatctggcgcttgcaatacaggtaatcctcgaacgtcggatgctcgatcgggctgatatggtcgggggagatgttcaggaacgtggccacgtcgaacgtcagcccgtacacgcgctcgaccttgtacgcctgcgaggagacctccatgacgaggtacttcatgccgttgtcagcggcctctcgcatcatgcggaaagcgtccatcgactcgggcgtggtcaggtcggactcgacgtacgtgtgcccgtccaggcagttgtccacggaggagaacagcgctgccttgccgtgcgagtgggcgttcagcacggcctgggtgaagtacgcggtcgtggtcttgcccttggtgccggtgatgccgaccacggtcagctcgtcctgcgggcgtccgtagaactccgcggacagcaggctcatggccttgcgcgcgtcattgacgatcaggccgggtgcgccggtctctgccgaaaaatcggtgtcggccacgtatgcggccagcccgcgctcgtcgatgtcatgcagatactcggccttgaaccgccccttgcagcacagcagcgtgccctcgcgcacgtccctcgtgtcataggtgatcgccgaaaaagcggtgtcagccccttcgatgtcgtgcgcatcaagcgtccaacgatccgcgcggatgatctcccgaagcagaccgtgccgcttgagcagttgcgccgccgatgccaacgttaccgtcataccaaaacctttcctcatggtgccgctgtcattgtacaagcccgacgaccgcgggaacgatatgcgcgacatgtgctgataagtccatcacaaaaccgtgcccacgctcacaatttcaccgcacgtcttgcatacaatagtgagcgtgaccgacgaacagcaaccgaacgagaccacggcgcaggcgcgagcgagattcgagaagctcgccatgcccgcggtcaacgcgctgtaccgccaggcgatgaagctcaccaacaatcccgatgatgcccaggaccttgtgcaggacacgttcgaacgcgggttcaaggcgttcgacagtttcgaggacggttcgaacttcgaggcgtggatgaccaccatcgagcgcaacgcatacttcaaccagtacgcgaaggcgaagcggcggccgcagcgggccaacgactccaccggcgaatacgacgactgggacatctacgcggcgtccgagcactcctcggaggggctgaaatccgcggagcaggagtatctggacgccttcgcgccgcaggagatcatggcggcgctcgcaaaactcccgcccgagcgccggcaggtgttcattgacgcagccatcgacggcaagtcgtaccagcaggtcgccgacgagcagggcgtgaagatcggcacggtgatgagccgcctgaaccgtgcgcgcacccagttgaaacgcgaactgtcatcgtacgcgctggcgcatggatacggcgacgcccgcaagcaactgccaagttcaccgtccgcgaactccagatccccggtgagcgttcataatggagatgacggaatgcgatccgttgcgacgagcgaaaggagcaggcgtgagtgaccctattgagcggcacagccatatttccatcacacggcagacgcctgtgggcatcgtccatgcggatatgcatatcacatcggtggagatttcgggcatgcccggtgacatgggcgatgatctggtcggggactgtttcgacccggattcgtgttgcgacgagcatgagaaggcgatgatcgcggcgctgcgtgcgtatctgcggcccgaggtcgcgccggaatgtctgctggcgcggttgcgcgacacgcttgaccgctgttgctgcgaggatggcgggaatgctgccggtgccgtcgacgagccgggacggtccgcgcaacccgcgcagcctgtacgcggcgctgcggtcgtgtcctgagacgcgatttcggcttgggcccctgtctcgaagctcggcaagcaggataaaacgggcctgcataataaaacggaataataagataacaaacgggtctgcccggctttcgctgggacagacccgttgtcgtctgttatgacaccgccgtatatggcgatgtctcgcggcgtggaatcacgccgtcaggcaagaatcaggcgttcggccttttgccgtggttggcggccttcttgcgacgatccttgcgcttgcgtccgcgcatgcccatgatggactcctttactacgattaataagccttgggaattatcacatacggggtagacgttgtgcaagtggcgaattgtcaccagccgtaggacggccgggtgtcggtcacttgaccgtcacctcgtagcgtaccacggtcgtgacgctcttgccgggctctatcacggtcaggtggtcgccgctgcggaacgcgttggccggggcggtcatcggttcgacggcgatgccgttcggatgctggtcgaacggggcgccggtggccgtgtagcattgccacgcgttgatggtctcgtcgccgaccagcttgatctccatgccatcggggcgggtgaacacggtcgttgtcgtgccgtcgtcggcgcggtggacgtccacccaggcgtcgtcgaacgcgcgtccgtccagaaccgggtcgtcgcgcagatcgaacttggtgccgtccacaggctcggtgccgttcggcaccagaccggcgtcaacggtgacgtgcgtgtccgcgtcgatcttcaggcggcatgcggccgaatcggcgtcacgctgctcgctggtctcgccgtttttgccgttcgccacccacgggtgcaggccgagcgcccacggcgccggctcgtcgccatcattgcgggcgctgaccgtgacggtcatgcccttgtcgttcagctcgtacgtggcggtgacggtgacgtcgaacggatagccgtcgaggttcgggaagcgcagtgactgggtgacgctgttctcggtgagcgattccagcttccacatgtactggtatgcgtagccgtggttcgcgttgttgcgcggctcgggatgatactcgttgaccggcgcgcagtagtgcttgcagttgaagtcgtattcgccgtccttgatgcggttcggccaaggcgcgaggatatagccgcagcaggtcggcgtcaggtcgtccggtccgtagctgcagaacacctccttgccgccgtagtcgaaacggcgcagcttcgagccgagctcgcagacgacggcggagaaatcgccatgatggatggaatactggttgccggtacgcggtgtggtgcccattgcttgctccatgatcgacagtgatattgttaccgctcgctatcatagtgtgcgctgggcttctgccgtgtgcggtcggggtgtcgcctgttgcccccgggcgttgtcatgtgccggtatcgcacgtgtagggatgttccggccgcacccgtgcgtgtgcctttgctacgctgagtcgttgtgattgagtgatgccgcatggcggccactgactgcatgaggaggatgatatggcgaaacgcatcgtgctggcggacccgcgcggattctgcgccggggtggaccgggcgatcctcaccgtgcagaccatcctgaaggccgcgtcggcgcgggtggatggcctgccgccggtgtatgtgcgtcgtcagatcgtgcacaaccggcatgtcgtcgaggatctcgccgcgcagggggccgtgttcgtgcaggagctcgcggagatacctgacgaggctgctgccgccggcatcccgatcgtgttctccgcgcacggcgtgtcgccgcaggtcaaggcggaggccgcacgccgcggcatgcacgtcgtggacgccacctgcccgctggtcagcaaggtgcatcgtgaggtattgcgtttcgtgcgcgaaggctacgagatcatctacatcggccatcgggggcatgatgaggcggtcggcgtggtgggggaggaccccgtgcacgtgcatctgatcgaacatgaggcggacgtggattcgctggatttccggccggagcagaagctggtgctgctcacgcagaccacgctcagcatcgatgagacggccggcaccatcgcggcgctcaagtgccggttcccgtggatgaaggagccgccgagctccgatatatgctacgccacgtccaaccgccaggccgcggtgaagctcgttgccgagcagtccgatagcgtggtgatcgtggggtcggcgaactcctccaactcggtgcggctcatggaggtcgcgcagggggcgttgggggagcgcgggcgagcgcaccgcgtggatgacgcgaacgagctcgacccgtcatggttcgacggggtcgaggcggtcggcatctcgtcgggcgcatccgtgccggacgaactggtcgcgggcgtcatcgaggccttgcgcgcacagggcttcaccgatgtatccaccgtggagaccatcaaggagaacatgcatttcgtgcttccggcggaactccgccggaagccctcgcaggcgcggtagtgcgcctgctcgcctcatcgccgctggcgggacgaggcgtatagcaaaccctatgtgagggtgttcaacgccaatgacggggccgccacggttcccggcatcgcggcgggggagtgctccacactcgcggtcgacggcaaggtgacgctgacgggaggctccacggtgaacgtgggcgctgacgggtatgcggcggcgggactgtccgccaccggtgcgcccgtgggcgccgtcgcgcttgccgaccgcagccggggccttgctgcgacatcgtgaaaccagtggcccaagcggcggagaatccgccgaatagtcgaggcattcccgattcgcgctctcaaaactcgcagatacgaaaagccgtttgttggaaaatggcggtttccgatttcgtaccttcgagttttgagagcggtagtatggaaaacatgggcaaaaaaacgaagcatgagaagggtgccggctccacgccggcgactgtgcagctggagaaggccggagtgccgttcaagacctacgagtacgagcattccaacgaccacatggatgacggttacggggtggaagccgcgaagaagctcggattcgatgagcatcaggtgttcaaaacgctgatggccgacaccggttccgagcgcgtggtgggcgtggtgccggtcagcggacacatggatctgaaggcgttggcggcggcggtcggtgcgaagaaggcatcgatggccgacccgaaggtcgcgatgcgcgagtccggctatgtggtcggaggcatctcgccgctcgggcagcgcacgcatcacaagaccgtgcttgacgagagcgctctgcaattcgacgagatcctgctgtccggcggcaagcgcgggttttcggtcggcgtcaatccgcatgatctgctcaaggtattgaacgcggtcgctgggcccatcggtacgtggtgacggagtccggctcagcccgccggcaagtgccgagccggtaaaaacaaagggtttatggtttgggctcccacagcgaagcactgtgggagcccaaaccataaacccttgtggaatctagcggcctagaccgcggggattcactcggagatctcggcgaagtacagcagggtacggatcatgttgcaggtgaagccgtactcgttgtcgtagaaggacacggtgcgggccatcgtggtgccgtcaacggtgttcacgtcggtctgcgtcgggtcgaacacgccaccgtgggtgtcgccgatgatgtcggaggagacgatgccgtcctcgttgtagccgtagtactcggtgttggagaaggcttccttgaacgcggcgttgatctcgtcagcggtgacttccttgttcaggacggtggtcagctcggtgatggagccgtccgggacctggatgcgctgggcatggccctgcagcttgccgttgacctcgggcacgaccttgccgatggccttggcggcaccggtggagtgagggatggtgttgatcgcggcggcgcggttgttgcgagccttcgggaagcgcgggccgtcgaggatcatctgggtgccggtgtaggcgtggatggtggtcatgaagccgagcttgatgccgaacttgtcgttcagcagcttgaccatggcggccatcgagttggtggtgcaggaaccggcggacacgatgttgtcggaagccttcaggatctcgtggttaacgccgaacacgacggtcggggtggtctcgtccttggccggggcggagatcaggaccttcttggcgccggcgttcaggtgggcctgggacttctcggcggaggtgtagaagccggtgcactcaagcacgaactcgacaccgtcgttcttgacccacgggatgttgttggcatccttctcggcgtagaccttgtattccttgccgtcgaccacgatggcgtcgtcggtggaggtcacgtcgaccggggtgccgtcgtcgtgacggaaggtgccgtgggtgctgtcgtacttcagcaggtaggcgagcatggacggcgtggtcagatcgttgattgcagcgacctcgatgtcaccggcctggccaccgcgagcctgcagctcgaagatgcggcggaaggcgagacgaccgatacgaccaaagccgttgataccaatcttaactgtcatgtgttctccctttgtagggtagaccgtttgcgcatggatgcgctatggcctttgtttaccaacagtgtctactgtaatgcgccgtctgtactagagcaacggtgtcgcgcttgctttgagcataaaacggccatattccgttaacgctaacaaatatgtctgtgcagcctgcggcgattcgatgcgaggcattccgcaccgcggcctcaccgcaccgccagcgccgaggacaccgccgtgtcgagcgcgcccagatccccgccgaacggatgccgcagtctcacctcaggcagcggcgcctcgattgggaacgtgacgatcagcgtgcccgactccaccgagaccgtcgccgcggaaccgtccacgaactcgttgctcaccccctgcacgacggtgttggcgagcgcggcgccctccagcacgtatttcagcccggcgatggtgacgccatggcagacgtcgctgtgcgagaacaccgagatcatgcggcgcggggcgacatgattggccgggaactccagcgccccgtccgcgatcgcggtaacgatgctgccgtcgccgtacagatatccgatgccgccatgcgaggccagtagcgccatcagctgcatgttggcgatcgtgtggtcgatgcgaccgcccagcgctccatatatatggaactcgcgtgcgccgcggctccatccgaccttcagcgcgctcagcagatccggatcgtccttctgcggcggcaggcggacgctgctgtcgccgtccggcacgtcgccggacagcgaatcgaaatcgccgatgacgaaatccggtgacagccccatcgcccgcatatggtcgagcccgccgtccgcggcgatcgccagcatccccttctcgatagcgggcgcgggcccctcgtaatactcgccggcgccgaaaatcacgcaacgttcatatgccatgctgccactgtatcgtgtgcacggcactgcgcgtcccgcgcgctgcgggcggcttcgctggcaggctcgaacgcagggcacgcacgaccggaggggaacgaggacgacatggcaaagaccgacgacgcgaaactatggccgatcctctcatcgaagctgttcctgtacgtcaccgagttcttctccggcatgggcgtgatggccgcggagctcggcgcgtcgcgcctgctgatcgtcaccgtgtcgacgaacttcccggtcatcgccgcgttagctgcatgccgatcttcgtgccgccgctgttcctgctcggcacggtcacgccgggcctcaacaagttcgcgaccgactcgctggggaacaacgcctccgtcgtcgggcgactgttcgcctgcaatacggtcggctcgattctcggcaccttcctgccgaccttcgtgacgatccccgcggtgggcacgttcgtgacgttcccgatcttctccggaccgcttctggcactcgcgctcgtgtatttcctcgccgcccgcgcccggaccgaaacttgtggcgacacgcccggtctgggggtgtggtagtatctacaaggcttgagaaatcaagaaagcggggcaaccccacctggaagcctgtcatggcctcgggtccaaggcaacagcctattcggtcgcgtggaatgcgcggtcgtgagcatgcctcatgaggcatgcgatcatgcgaatatgtatgatggccggcgctgcagtgcgcacggttcggtgagccatggattcgtccgtcatgcccggtatccggcgaaggtccgcttcggagaacatgaggattggagtcatcattagcgacgaaccacgtatcaatgacgagattcgcgtctcgcaggtacgcctgatcggcccgaacggcgagcaggtgggagtcatcgcgacctcggtcgcgctcaacctggcgaaggaagcgaacctcgatctcgtcgaggtggcgcccaacgccaagcctcccgtcgccaagctgatcgattacggcaagttcaagtacaacgagaagatcaaggcccgtgaggcccgccgtaaccagagcaccgccgaaatcaaggagatccgcttccgcctgaagatcgatgaccacgatttcgaggtcaagaagggccatgtggtcaggttcctcaacggcggcgacaaggtcaaggtgaccatcatgctgcgcggccgcgagcagtcccgccccatcggcggcgtcgaactgctgcagcgtctggccgcagacgtcgaggagtacggcaccgtcgagtcccggccaaagcaggaaggccgcaacatcatcatgacgcttgcgcccaagggcaagaaggtgcacacccagtccgagcagcgccgccgcggcgaccagtcgcgcgccgagcgccaggcccgtcaggccgcccgcctcgccgccaagcaggaggcgcagagccaggcagcggcggcgtccgcagccgcgatcgacgaccaagacaagacttccgaaacgaagtaaccaacaaggagggcagcaatgccgaagatgaaaaccaattccgccgcgtccaagcgcgtccgtgtcaccggctcgggcaagctgatgcatgcaggcagcgccatgcgccacaaccttgagcacaagtccgctcgcaagcgtcgtgcgctgaaggccgacggcgtgctggccacggcccagtccaagaacatgaagaagctgctgggccgctgaaccgcgccagccgaatagatacgtcaaaagaaagctgaggaataactatggcacgtgtcaagcgcgcagtgaacgcccacaagaagcgtcgcgtcgttctcgaaagggcctccggctaccgtggccagcgctcccgtctgtaccgcaaggccaaggagcagctgctgcactcctttacctacaacttccgcgaccgcaaggctcgcaagggtgacttccgcaagctgtggatccagcgcatcaacgccgccgtccgcgccgaaggcatcacctacaaccgcttcatccagggtctgcacctggccggcatcgagctggaccgccgcgccctcgccgagctggccgtctccgatcccgagaccttcaaggccatcgtcgagcaggccaaggccgctctgcccgaggacgtcaacgctccggtcgaggcctgagccgcgaacctcggcggatgcgccttcgcgcgcatcggcaaccgcatgagaaccccgccctgtgcggggttctcgcatatcatgcgggaacgtgcagatatgcaagccttccgcacgcatacagggtcctcgcatatgatggggcaccatgtacaacggatccacccggcttcttgaccagttcatcgcgcatatctccgtcgaacgcggactggccagggcgaccgtgcgggcatacgaatccgatcttcgccgctatctctcgtggctcgcgcacacgcgcggcatcaccgatcccgatgccatcggcaaagccgacatcgaggagtacgtggcgcagctggattcggacggcgacagcgcgcgcagcaaggcgaggaggcttgccagcatccacgagttccaccggttcgccctcgctcagcacgccgtgagcgacgacgtgtccgccacggtcaaggcacccaagagcgcgcagatgctgccggatgtgctgacgatcgacgaggtctcccgcctgctcgacgcgattcccgacccgcacggcaccgacgcggcgcgggggagagctggcaccggagcgttgccggacgccgtgctgctgcgtgacagggcgctgctcgaattcatgtacgccaccggatgccgcgtctccgaagcggtcggaatgaatctggacgacatcgacatcgacgacgcgcatgtggcgcggctgacgggcaaaggatccaagcagcgactcgtcccgctcggcgaatacgcatgtcgcgcgctgcgccgatacctcgccgaggggcgcggcacgctggagggccgcgccaagggcacgccggaacgccgcgcggtattcctcaacaaacggggacgccggctgtctcgccagtcggtatgggaggtcatcaaactggcgggggagcgtgccggcatcgatcgtccgcttcacccgcacacgctccggcactctttcgccacgcacctgatccagggcggcgccgacgtgcgcaccgtgcaggaactgctcggccatgcctcggtcaccaccacgcagatatacacgcacgtcagcccggagaccttgattgaggcgtacctcacctcgcatccgcgcgcgcggtgaacgcggagcggttgcccgggcgcgatagcatggatgcgacatgcgaaggaggcagctcgacatgcagcaggcggcatattcccgcttcgacggcgacgacgcgggaaacaggcagggaacgctgccgatccgcggcacctacgccgccgcgccacggggagacgacgggtcttcggcggaaacggtgatggtcggcacgtccggcggccccgcgcacactggtgatgataaggtgaacggtatgcctactgatctgcttggacgagaatacgagacgtttcccgcgccgaaaccgctgtcgcagcacggtcccgcgcgcatcatcgccatatgcaaccagaaaggcggggtgggcaagaccaccagttccatcaacatcgccggcgcgctcagccagtacgggcgccgttgcctgatcgtcgacttcgacccgcaaggagccgcgacagtcggcctcggcatcaacgcgaacgctgtcgagaacaccgtgtatactgcgctgttcgacccgtcgatcgatccgcacgagatcgtacagcacacggatttcgagaacctggacatcatgccggcgaacatcgacctgtccgccgccgaggtgcagctggtcaccgaagtcggtcgcgagcagatcctcgccagcgtgctgcgaaagctccgcaacgaatacgacgtgatcatcgtcgactgccagccgtcgctgggcctgctcaccgtgaacgccttgaccgccgcggacggcgtgatcatcccggtcgccgcggagttcttcgcgctgcgcggtgtggcgctgctcatgcaatccatcgagaaggtgcagtcgcgcatcaaccccgacctgcaggtctacggcgtgctggtcaccatgttcacgcgcaccctgcactgcgaggaggtactgcagcgcatctacgaggcgttccaggacaaggtgttccattcggtcatctcgcggtccatcaagttgccggacgccaccgtggccgccgccccgatcacgatctacgctcccggccacaagaccgcgaaggaataccgcgaggtgtcgcgcgagctgatcgcccgcggcatcgtcgcgtgatggcgcggccatggtgagcggcgcaagcgcgatgcgatgagcgagttgacggaacctgccgacggcggcgagatcggaggcgatgccgccgtctccccgggattctccgtcgaactggaggtctattcggggcctttcgacgcgctgctgtccatgatcgcgaaccggcggctggagctcaccgaggtgtcgttgtcggagatcaccgaggagttccttgcctatgtgcgcacgctggatctcgcgcgcaacatggaggaggcgagcgcgttcctcgatgtcgcctcggtgctcgtcgaggcgaagagcgcggcgctgctgccgcatgaccagacggatggggagcgcgacgagcagagtctcgaagcgctgcgtgagcgtgacctgctgttcgccaggctgttgcagtatcgtgcgttcaaacaggcggccggcgattttcgcgcccggctcgctgccaatgccggcaggttcccgcatccggcatatgtcgatgaacgtgtcgcggcgatgctgccggagcttgcatggtcgctgggcgcagaggacttggcgcgcatcgccgcacaggtgtttgccaacgcgccggccagcgaggtgtcgctgcatcagctgcatgtgccgcttgtcgacctgcgcgcgcaggcggcggtcgtgcgcgaccggttgcaggcgttgccggccggcggttcgatgacgttcgcggaattgacgcgtgacgcacaccgccgtgtagaggtggtcgcgcgttttctggcggttctggtgttcttcaagcaaggcgtgctgcagtttcggcaggccgggccattcgagacgctgcatctgcgctgggtcgaagacgcccaggacaccggtgtggtcgacatcgcggagggggacttcgcatgaggctcgcaaaacgtgaagatacaggcagcgtcgtattggaaaaaagcggtttggttttttatatctcgacgttttgtgagcgagaaaggtgacgtgatggatgcgcaattcacggcggaggactttccgggcggtctgagggcctgcatggaggcgattctgatggtcgccgaccagccgcagcacgccgccgacctggcgcgggttctgggcgtgggcgagcaggaggctcgtgccgcgctggagcgtctgcgctcgcagtatgacgaggaggggcgcggcttcgagctgcggcataccgcgcgtggctggcagttcgcgagccgggcgcaatacgagcaggtggtgtcggcgttcgtgactgacgggcagaccgcgcgcctgtcgcaggcagcgttggaggcgctggccatcgtggcgtacaagcagcctgtgacgcgcgcccaggtcgcggcgatccgcggcgtgaactccgacggcgtgattcgttcgctgacagtgcgcggactggtccgcgaggatggcgtggacgaggattcccgggccgcgctgctggtaacctccggcctgttcctggaacatctcggattggagtcgctcgaccagctgcccccgctcgccccattcctgcccgaacgcgagaccaccaacgtccccgacggcgaataagagttgccggagggctgtcggccgtaagccgactggggtggtcggtgtttcagcgtatgtaggttatgccgcctccgcggcctcgcatgacacaccacttaaagtcatgttgactataagtgatatgctctggtcttgaactggagagcacaccagtcggaaagtgggcatgcatggtcggcggaaacgtgtcggagcggcggatgcaaccgccggccgtcggggtctccgtggtgatcctggccctggggccggaggagaccgcgtcggattgccgtgacgcgatgccctcgcgtctgtggctgccgctggtgcgccgcgtgcgccagccgtttctggggcggtgggcgctgccgggcggcgatttgcgcgccgaccgttcgctggagcagtccgcctaccacgcgttggagaccaccacggacctgcatcctcgctaccttgaacagctgtatacgttcggcgatcccgcgcgatcgcacggtggcctgccgatggtctccatcgtctactgggcgctggtcggcaaggccgaagcccatgatttcaccgaggcggacaacgtccggtggttccccgaggacgagcttcccgaactggccttcgaccatcggcagatcatcgactatgcgttgtggcgcctgcgcaacaagatcgaatacccggatatcgccaccaagctggtcggtgacacgttcacgctgcgccagctgcatcacgtgtatgaggccataaccggcgaggccatcgacgtggcgaatttccggcgtcgcatgctgttgtccggcgagctggaggataccggcgagaaactgcgcgatggccgccaccgcccggcggccgtgtaccggtacaaccccgaccgttcccgcgcgtcgacggccccacccgtcgggccgccacgcgacgcgccgaccatcgaggagctggagggccagcgcatcgaggacgcgctgtccgcgttgatgccatcggcacgcgcatgacgggaggcgggcggcaagacccgcgtccgtgccgtataaccgcatattgattttggccggccacccggttgtcagatacgttggcgtgcccgcacgccttagagaaaggaacacaccatgagcgcaacattgtccgccctgtcagtggatgagatcatcgcccgcctcggtgcgcagagcacctgcgacgccggcctgacccaggatccgtggcatttcgacaccaccaagcccagctacgggccgggcgcgtccatgctcgacaagctgccgcacaacgcacctcgccagcaggtgctgccggaggagtaccgcaacgcctccgacgaggagctgcaggagcgcattcgctcggccaagtcccgtctcggcagcaagctactgattctggggcatttctaccagcgtgacgagatcatctgccacgccgattacgtgggcgactcgttccagctggccaagaacgccacgcagtgcccggacgccgaccacatcgtgttctgcggcgtgcatttcatggccgagaccgccgacatcctctccacgccggagcagaccgtgacgctgccgaacctctccgccggctgctcgatggccgacatggccaacatcgaccaggtcgaggaggcctggagccagctcggcgagatctgcggcaccaagcccgacgcggacggcaggcagcagatcatcccggtcacctacatgaactcgtccgcggccttgaaggcgttctgcggacgcaacggcggcatcgtgtgcacctcgtccaacgcgcacgccgtgctcgaatgggcgttcgcgcgcggcaagcgcgtactgttcttccccgaccagcatctgggccgcaacaccgcccgcgcgatgggcattccgctgagcgagatgccgctgtgggacccgtacaaggcgcagggcggcgcgaccgacccgtccgactacgccaaggccaagatgatcctgtggaagggcttctgctcggtgcaccagcgcttcaccgtcgaacagatcgagaaggcgcgcgccgcgttcccgggcgtcaaggtgatcgtgcacccggagtgctcgatgcaggtcgtggacgcggccgacggcaccggctccaccgcgtacatcgtcaaggagatcgccaacgcgccggccggaccggccatcgccgtgggcaccgagatcaacctcgtgaaccgcctggccgcgcagtaccccgacaagaccgtgttctgcctggatccggtggtctgcccgtgctccacgatgtaccgcatccacccggcgtacctcgcctgggcgctggagaacatcgaacagggcaacatcgtcaaccgcatcaccgtggacgacgacaccgcacgcgaggcaaaggtggctctggagcgcatgctccaggtgcacccgtgatcgcaagctcccgtcaacgggagcacatcaacaacattgaggaagcagcacaatgagcaacgctgaaatcgtcgtagtcggcgcgggcgtcgcgggcctttccgcggcgctggcggtggccgatgccggccaggacgtgacgctggtcaccaaggccgacctggtggaatccaacacctaccatgcgcaggggggcatcgccgcggcggtcttcgccgacgacgacccgaaactgcacgcggccgacacgatggccgcggggcatggtctgtgcgagccccgtgccgtggagatactgacccgcgagggcaccgaccgtgtgcggcagttcgccgccgcgggcgtgcatttcgatcgtgacgcgcaaggccacatgctgcgtggcctcgaagccgcgcattcgcgggcccgtgtcgtgcacgccgggggagacgccaccggcaaggtggtcgaactggacgtgtccgccatggtgcgggccaatccgctcatccacatcatcgagcatgcgttccttgaggatttgattgtgcgcgacggcgccatcgccggcgtgcggctgctcgtcagggacggcgagacattccgcagcgccgacatggccgcttcacgagtcatcctcgccaccggtggcgccggatgtctctacccgtacaccaccaatccggccgtcgccaccgcggacggtctggcggccgcatggcgtgccggcgcacaggtcgccgacgtggagttctaccagttccaccccaccgcgatggccgtgggcgagcacttcctcgtttccgaggcggtacgcggcgagggcgcggtgctgctcgacgagcacggcgaacggtacatgacccgtgtcgacgagcgcgccgaactcgcgccgcgcgacgtggtggcccgcgagaacttccgcgtcatgcaggcgcagggcggcaagcccgtgatgctcgacgtctcgccgatgcgccgcgagaacccggatctggccgagttcctgcgtcaccggttcccgaccatcgacgcctatacgcgttctctcggcttcgactggagcaaggagccgattccggtcgcgcccgccgcgcactactacatgggcggcatccgcaccgatctggaaggtcgcgcgagcatccccggcctgtatgcggccggcgaatgcgcccgcaccggcgtgatgggatccaaccggctcgcgtcgaactcgctgcttgaaggactggtgtacggtcgtcgcgccgggctcgccgccgtgaacgatccggccggttccgtgtggaacccggtctggttctccaactcggccaccggccgcatcgtcagcgacacgccggtcgagctgagcatgccggcacccgatgagcgtgccggggccaatggccggcctgccatctgggatcgcacccgcatccagaacacgatgtgggccggcgtgggcgtgttgcgcgacggcgacggcctgcgccaggccatcgaccagctcggcaccggcctggcgttggccgatgccgacgcgacggaacccgctgccacggcctgtgagcctgacccgatcacccgcctggaaaaccgcaacctgctcaccgtcggctacgtcgaggccaacgccgcgctgcgccgcaccgagtcgcgcggcgcccacgcccgcaccgactatcccgagtcatgcgacgagtgggcccaatccatcgcctacatcaacgcctagcgctgtttgctcacttgtcggttggcgccggaatggaggaattggcacgccgatagcttccacaaccactcctacgcttcacgggggctcggcggggtgatcggacgacggtctcggtaccctgacccgatgcattgcgattaatcccgcaagaacgacagcagtccatatcaagaaagacccgatcatgcttacgcaacacatcatccgcaccgccgtcgaggcggcgctcgccgaagacgcgccctacggcgacatcacctgcgagaccacaatccccgcggacgaaaccggctcggcgcacctcaccgcacgcgagaggggcgtgatgagcggcatcgccgtgttcacggccgccttcacagcgcaaaatcccggtatcggcgtctcgcccctgatcgcggacggggagcgattccagcgcggccagatcctcgccaccgtggaaggtccggtacgtgacctgctcgccgccgaacgcatcgccctcaacttcacccagcgcatgagcggcatcgccaccatgaccgcctccttcgtggacgcggtcaacgccatctacgatgacggacatgacgggaccgtcacccggccgcatcgctacgagcgcactcgcatcgtcgacacgcgcaaaaccacccccggcctgcgcccgttcgagaaatacgccgtggtctgcggcggaggccacaaccaccgttacgggctgtccgacgcggtgatgatgaaggacaatcatctggcggcgctcgccgcacgcggcatcgacctgaccggcgcgatccgccacgtgcgcgaacaggtgggccacaccacgcatatcgaagtggaagtcgaccggcttgagcagattcccgccgtgctcgccggcggtgcggacaccatcatgctcgacaacttctcgctcgatgacacccgccgcggcgtggatatcatcaacggcaaggccatcgtggaagccagcggcaacatgagcatggagcgcgtgccggccgtggccgccaccggtgtggacgtgatctcagtgggcgcgctgacgcacagcgtacgcagcatcgacctcggattggactggaactagccatgactgacactcccaatgcatccggcgaacccgacgagctgtatctggacgccgctgccaccgagccggtgaccaggaacgtcatcgaggcgatgatgccgttcatgaccgacgcatacgcgaacccggcaagcgtgcatcaacccggcaagacggcggcgagggcgcttgatgccgcccgcgcctcgttcgccgccggtctcggcgctcgcccggacgacgtgatcttcacttccggcggcaccgagtcggacaatctggccatcaagggcatcgccatggcacgtatgcgcgcactcggcctgcagccggtctacggtcttgccggaatcgatgacgagccgtccggcgtgaaccccgcgcaggccggtgaacatccggcgatccgccgtccgcgcatcatcatctcatccatcgagcacccggccgtcgcgcaatcggcgcaatggctgaacgaatggttcggcttcgaagtcgtgcacattcccgtagacggtcaggctcacctcgaccttgacgcgctcgaacaggagctcgacggcgaggccggtgaacgcaccacgctggtttccgccatactggccaacaacgaggtcggcaccgtcgaacccgtagaggagctggtccgcatcgcccacgcgcacggggttcccattcatgtggacgccgtgcaggcggccgggcagattcccatccgcatgcgcgattgggatgtggacgcgctgagcgtgtccggacacaagttcggtacgcccaagggactgggggcgctgctggtccgcggtcgaaccccgatcgagccggtgctttccggcggcggtcaggagcgcgggctgcgctccggcacgcagaacgtggccggtgcggtggcgctcgccatagggctcaacgagtcgaacgcgcgcatggcggcgcagtaccgggagctgacggattcccgcgacatgctgattgacgccgtgcggcgggtggtgcctcgcgccgaactcaccggtgacccggtcagtcgtctgccgggacatgcgtcattcattttccccggagtcaccggcgaagctctgcttgtcgatctggacgcccgaggcatagccgcctcgtccggatccgcttgcgccattggccgtcacgagattcccggcacgctgcttgccatggggctggaaccgcagatcgccaaatccgccctgcgtatgacattccgccgtcccctcacacgggaggaaatcgagcgcatctccatggccttggaagactcctacaccgagctgacgcattagtgcacatggtctccagtcaacgatccctgcgggggcaacgtgtgctgttactcatcggagggcggttcggttgtgtgtcaaggcgtatcgctaggcttatgccggtttgcgtgtaagtacagatatgaaccaaaacaagtaccgaacggttacgcgaagaatcaattaagagaggtttctatggcggttcgcggtgatattcgtaatgtggctatcgtggcacacgtcgatcacggcaagaccacgctggtaaacgcgatgctccagcagtcccacgtgttcaacgagcgcgaggaggtgccggatcgtgtgatggactccaacgatctggagcgcgagaagggcatcaccatcctggccaagaacacggccgtggaatacaccggtccgctggcggccaagtacggttacccggacggcatcacgctcaacatcatcgacacccccggccacgccgatttcggtggcgaggtcgagcgcggcatctcgatggtcgacggcgtcgtgctgctcgtcgacgcttccgaaggcccgctgccgcagacccgtttcgtgctgcgcaaggcccttgaggccaagctgccggtgattctgtgcgtcaacaaggtggatcgtccggacgcccgcatcgaagaggtcgtctccgaatccaccgacctgctgctgggcctcgcccaggacgtcatcgaggaaggcgtcgacctcgaccttgaccacctgcttgacctgccggtcgtctactgcgcggcgaaggccggctacgcgtccgtcaaccagcccgagaacggcggcctgccggacaacgacaaccttgagcctctgtttgaggacatcatcaagtacatccccgcccccgaatacgaggagggcgcgccgctgcaggcgcacgtcgccaacatcgactcctccgacttcctcggacgactcggcctggtccgtatctacaacggcacgctggagaagggcaagacctacggcctgtcccgcgtggacggttccatcgagaacttccgcgtcgtcgaactgctgcgcacgcagggcctggagcgcactcccgtcgaatccgccggccccggtgacatcgtcgccgtcgcgggcgtcaacgacatcatgatcggcgagaccatcgtcgatccgaacgacccgaagccgctgccgctcatccacgtcgatgacccggccatctcgatgaccttcggcaccaacgactccccgctggccggccgcgaaggcaaggaccacaagcttaccgcccgcatgctcaaggatcgtctcgaccgcgagctcatcggtaacgtgtcgatcaaggtgctgcccaccgaccgccccgacgcctgggaagtccagggccgtggcgagctcgcgctggccatcctcgccgagcagatgcgccgcgaaggcttcgagctgaccgtcggccgcccgcaggtggtcaccaagaccatcgacggcaagatcaacgagccgatggagaacaccaccatcgacgttcccgaggaatacatgggtaccgtcacgcagctcatggccgaccgcaagggccgcatggactcgatgagcaaccacggttccggctgggtgcgtctgcagttcaccgtgccgtcccgtggcctgatcggcttccgcaccgcgctgctgtccgccacgcgcggcaccggcatcgcctcctcgctgtccgccggctacgcgccgtgggccggcgccatcgtcacccgccagaacggctcgatggtctccgaccgcgccggcgttgccaccccgtacgccatgcagcggctgcaggcccgcggcaacttcttcgtcgaaccgcagtccaacgtgtatgagggccaggtcgtcggcatcaacaacaagccggacgagttggacgtgaacatcacgctggccaagcacatgaccaacatgcgttcctccaccgccgacgtgctggaaacgctgactccgccgatcaagatgagccttgaggagtcgctcgacttcgcgaatgaggacgagtgcgtcgaggtcacccctgaggcgattcgcgtgcgcaagatcatcctcagccgtgaggactggtacaagtggcgtgccaagcagcgtcgtcagaacaacaacgcctgacggcgttgccgttctgacgaccgtcgcgggcgctgattgcgcgcccgctcccttcacctacggacagtccgctggactgtccgtttggcggttcagcagtccaacaacgcctgacggcgttgccgttctgacgaccgtcgcgggcgctgattgcgcgcccgctcccttcacctacggacagtccgctggactgtccgtttggcggttcagcagtccaacaacgcctgacggcgttgccgttctgacgaccgtcgcgggcgctgattgcgcgcccgtctgcttgcttctgattacggagagtccattggactctccgtttttgtttttcgaggggctgttctgacgggtctgtgtgccacaccaggccgatttcggcgtttttagggctggtgtggtacgacggaaattcctgcgattgggacgaatgtttgttcatcgttgaaaaatggcggtttctatgattttgcctgttgccataccagcgaatgttagggctaacattccattgtgtggcaatatgttggccacacaatgcgatttttgcctgttttgacgctggtgtggcatgttctgcggcagcggcatggtgttatgtcccgccagcgggggcaagatatgagttcgccgggccttctggcctgtaattggatggcctgcggacacggcttccgctgtttgccatacggctcattgcgccagcggagcgagatttcaccgcgccgatacagcgcatctccttatactggtgaccatgactcaatcggatgatcgttcaattctgccttggtctcatcggctcagccccgtgctgcgcggactcgtcaccgtcgttgccggcatcctgtgcggcatcgtcggcacgttcgcgcatcgcatgggcgcttcggccaacattccgtatggactggtgctcgccttcctgattcttggcatatcggcgtggtgtgcacgctcgcggcttgacgtcgtcggtctcgccctgcacctgatcgcctcgtccggcacgatatggctgatcgctgtgcaatccaccggcgacgcgttgacgccggtcggattcagcggatcatcggtgccgtatttttcccagcgtgtgggatacctgtggctgatcggctgcatcgtcgtccagctgatgctgatgttcctgcccgcgcgatggttcgccatcacgcccaagaccgatggaaagaccgacgacaagaccgacgacaagaattcgcagcagccatcgcagctgtccatgtcccggcagactcccgacacgctggcggagagccgatgatggccgagtatacgttgcatttcctggggccgaccgggacgttcacccatcaggcggcgatcgaggccgccaagatgatccgcccatccggcgcatccgtgacgctgacacccgagccggacgtcccgacgattcttgacgcggtgcagcgtcggggtgactggggcatcatcgcgtgggaaaacaacgtggaagggtacgtcgtgccgaacctcgacgcgctcatcgacgctgacaatgtggtcggattcgcccgagtcggcgtgaacgtgtcattcgatgccttcaccttgcccggcgcatcactcgccgattgccgtaccgtcaccgcccatccgcacgggctggcgcaatgccgccgtttcacggccgaccatcagctgcagcagctgccggcatcgtcgaatggtgccgcctgccgagaccttgagcccggccaggtggcgctcggaccgagcgtctgcggcgatttgtacaatctgacgcgcgtcgcctgcgccgtgggcgactatgccggcgcgcgcaccgagttcctggcactcgccccgcgggacgaggccatcaccgtgctgcgcgagcgggcatcacggacggccggggatgagacagtgggatcgatgccggctccgggggcgacgaccgaccccgtttcggaatacgaatcgatcatcgcgttcataccgctgagcacaggccccggcgtgctcgcgaatctgctggacgtgctgcgcgacgccggtctgaacatgacgagtttcatatctcgcccgattaagggacgcgacggcacgtacagtttcatcgcgaccatcgatgcagcgccctggcaggaacacctgcgcgacgtgctgacacaggtcgtcgaccatggcgattgggtgaagacgctggcggtgtatccgcgccgcgaacggccgaacccgccgatctacgcgtggtcgctgcccaacgggggagtgcgccgcgcgccggccgcgcccggcacatggacggaaggcgacactgcgcgaagggaattgctgtggtaggaagtcatgatactgcggccgccgcacggctcacggtcggagtcatcggactcggcctgatcggcgggtcgctggcccgaaggctcgccatccgcggggtgtcggtcgtcgcgtggaaccatcgcccgcatccatacgcccaggccgaagccgatggcatacgctgcatgcgcacgctcgccgaactggtcgaagcgcagccggatgtcatcgtgctgtgcaacccgctgaaggcgatgccggcgatcctcggcgagttgcggccgctgctcgaaccgtatcaggacatcacgctcaccgatgtgggcagtgtcaagatgatggtccgcgatcaggtgcgggacgcgggtctggcgggccgctatgtaggcgcgcacccgatggccggcaacgagctctcgggatgggccgccgccgccccggcgctctacgacaacgcgctgtgggccatgaccgtggatggcgacaccgattaccgtcgttttctcgccgtcgcgcggatgatcaccgacgatacgggcaaccgcgtcatcgtgctcgacgacgatacccatgaccgcgctgccgcgctgatctcacacatgccgcacgtcgtcgccacggcgctcatcaaccagctgaccgacgacccggaccgcaacatcgcggctgcgctcgccgcgggaagctggagggacatgacgcgcgtcgcgctgaccgatccggaccgcacccgtgcgatggtcgaagaggacgccgacaatgtggaacgactgctgcgcatgatggcggcgcggcttaccgaggtcgcggacgaattgcatggcgcagatgcaggtgccatcgccgcgtttttcgcggatggacagccgttccgcgactacaagtccgcggtcagaagcggtgcggacggggacgggccggtcttcgacctgacgatacccgcggagggatggcaggcggcactgctcgattccgcccgccgcggcgagcatatcctgcgtttcggcgacgactataccgcctgcgtgcagcgtcgcagcgcgatgtgatgctgcgggctacttgacgatagaccacccctagtcggccacgggctgactaggggcttgacggcaccacagctcaggggcgggtgaagtggcgttcggggacgggtttgagggtgatgatggtgtcggcgtcgatggtcacgcgatgttcggggcgtgacccgttggccgccgcgtcgcggatcatatccaacgtgtgaccgtcccatgaggtgacgtgtccgacgtaatcgcggtatttcatgcgatggtcggtcggatcgaccccttcggacactcggacgaccactcgcgcgttggcagggatttcattgggaattgccatggggactcctttgccgtcggtttgttccattctagtgggtgaaacgcggttttgcgggatagaatcggcaaagaaaggagtgtgcatggatggcgatggtgatctgtccgcgttccttgcgtatctgcgggccaacaggggattgtcgggcaatacggtgaaggcgtacggcaccgatgtcagggagtgcctgcatgcactggcgtcgcgcggcatcgcagatctgcgtcaggtcacgaccgacgacctgcgtggatggatggcgttcgagacccgcgaccacgcccgctccagcatggcccgcaaggtcgtgtcggtccgttcgtttttcgcttgggcgcatgagcatggcaggatcgaggccgatccggcggccgtgctgatgacgccgaaactgccggacacgttgccttcggtgctgactgaggcccaggcggagcgcctgatggaccgtgtggatgacgatgcgtcgctgcatgccgcctcatcgcagcgttacgagacacggcatgatgagatgccccgccttgattcggcccatcggggcgaagggatgagtcagcgtgacgaagtcgtggcgctacgtgatgcggccatgctggaattgctgtacgcgaccggtatccgcgtggcggaactcgtcgggctcgacatcggcgatgtcgactggtcccaccgcacgatacgggttacgggaaagggcagcaagcagcgcgtggtgcccttcggcgaccctgccgagaaggcgctggccggctggaaggagcatggccgaccattgatattgcgcagagccggtgcgggcactctcgatacggccgcgttgttcctcggcatgcgcggccgccgcatcgaccagcgtatcgtgcgcgatgtcgtgcatcgtgccgcccgcgagagcggggtgcccgatatcagcccgcattcgctgcggcacagcgcggcgacgcacatgctggacgggggagcggacctgcgcgaggttcaggagatgctcggccattcgtcgttgcgcaccacgcagcggtacacgcatgtgtcgatcgagcagctgaaggagcggtaccgccaggcgtttccccgggcctgacatcgtcacgttccgagcttgatcgtcccgcgattgcctacgtcgacaactccgcgataactccgcggtcatcctgcgcttaccctgcgcttaccctgcggtcatcttgcgatcaacccgtgatttcgcctcgattgccctgcaatccgcatgattccggggtgcaacaggcgaattgtgcacgttcacatcatttaaaatcttgaaatgtgatacaaatatgaacaaaatgtggcaattaacgtcgaaatcttgacggaagcgtatccttatcacgttttgcgtttacatggggtgactataatcggtcaccaacaagaacgccgccatccaaaggcgacagtcgagtgaacgcttttgtcgttcggaacaaggaggaaggatggccccggctcaatgctgaagttcatcgccaagcgcctcgccaactacgtcgtcatgctgttcgtggcgatttcatgtacgtattttctggcttctggtttcatgcgtccgcgctcgaattacgagtcgaggactccccgccctccggcagcgtccatcaaccgcagcttggatctggccaatatcaatgatcacaccaatatcttcactcggtattggcgttggctgaccggtgtcgtcaccagatgggactggggactgtcccctgatctggggtcggtcaacggtgcgcttgcgccgcgtatcgttgcctccaccgagctggtgacgatcgccacagtcctttccatcgtgcttggcgtggcgctcggcatctacaccgcgcagcgccagtacaagtggcaggaccgcctgttcggcaccactgccacgttcttccttgtcatcccgaccgccgtgttcgctctgcttgtcgtgatgctcgccatcttcatcaacggcgacagcggcttccgcctgttctatgtgacgggtctgtccagttatacaggaaataactggttcctgagattggctgatttcgggcagcacatcatcctgccgaccatcgtgctgacgattctgggcatggtctcctaccatctgacgcagcgcacctacctgcttgacgagatgcacgccgattacgtgcgcaccgcccgtgcgaagggtctgacccgccgccaggccatccgtcgccacgcgttgcgcgcatccctgattccgaccgccgtcaacgtcgcattctccatcgcctcggtgttcaccggcgcggtcatcaccgaatctatcttcgccatcaacggcttgggccggtacttcatccaggccattctcgacaacgacatcaatgcctcggtcgccatcgcggcgttcggcggcgtgtgcaccctcgccggtgcgctgctggccgacatcgtgtccgcgtggcttgatccgcgcatcaagatgagctgagtgcaggggatgtgagaaacaatgactgatacaaccgtcaaaaacaacgaaacgacacagaaagagtccgacgagagcacgtcgaagggcgatatcaagcacatcggttacgccggcctgatcgcgcgtcgtttcttccgtcagcgctccgccgtggtcggactgatcatccttctggtgctggtgttcttcgcgctgttcggcgccaacatcggcaagtgggcgtatgacgaccctgacttcctcgccctgtcggcaggtccgagcgccagccactggctgggaaccgactccggcggctccgacctgtacgccatggtggtgcgtggtctcggcaagtcgctgatgatcggcatcatcacctcggtggcgacgatggcgatcgcctcgctgctgggaacggccatctccttcttcggcggctgggtcgagcgcgtcggcatgtggctgctcgatatgctgctcgtcgtgccgtcgttcctgctgatcgcaatgatcgtgcgcaccgcgaacgccaccaccggatggatctggctgatcatcggcctgaccgcgttcggctgggtcggctatgcgcgaatcatacgaacgctgacgttgtcgctgcgcgagcgcgactacgtcaaggcggcccggttcatgggcgtcggatcgttcaagatcatcgtgcgtcacctcatgccgaacctcgcctcgatgatcatcatcaacacggtgctgggcgtcgtgggcgctgtcaactccgagaccgcactgtcgtaccttggtctgggcgtcaaggcgcccgacgtgtcgctgggttccatcctgcagtccggcgccgtgtccatgcagaccgctccctggctgctggtcttcccctccatcgccctggtcctgttgacgttcagcatgcagctgatcggtgacggtctgcgcgatgcgcttgatcccaattcacgtgcgagcggaacggtgggtgcctgatgttcagaaagacaatgatgaaaaacaacaagtcaaagggcagcgtctcaagcgagcacaaggagatcgtgcgcgacgacatcctccagtacgagctgcttgaaggcaacggccccaagggcgcgccgaagggcgatccgatcatgcaggtgcgcgacctgcacgtgtccttcgccacagaggccggcgtgtgccgtgcggtgcgaggcgtcaacttcgacctgtggcgcgggcgtacgctcggcatcgtgggcgagtccggctccggcaagtccgtgaccgcgttgagcctgatcggcctgctcgacgacaacgccaaggtcaccggctccatcatcatgaacggcgaggagctcatcggcaagaccgacgaggagatgagcgagatccgcggcgagcgtatcgccatggtgttccaggatccgctgtccgccctgaccccgatgctcaccatcggcgaccagatcgccgaaggcctcatcacccatcatcccgacatgtccaagcagcagattcacgaccgttgcgtcgagctgctcgatctggtcggcatcccgcagcccgaggagcgtctcagcagcttcccgcaccagttctccggtggtatgcgtcagcgcgtgatgatcgccatcgccatcgcgaacaaccccgacgtcatcatcgccgacgagccgaccacggccctcgacgtgacgattcaggcgcagatcctcgacgttctcgccaaggcgcagaaggagaccggcgccgccgtcgtgctcatcacccacgatctgggcgtggtggccggcgcggccgacgacatcctcgtcatgtatgccggtcgtcccgtcgagcgcgccagcatcgacgacgtcttccagcacccctccatgccgtacacgatgggtctgctcggcgccgtgccgaagccgcacatcgccgcctcccagcgtctcgtgccgattcagggcaacccgccgtcactggtcgacatcccgaagggatgcccgttctcgccacgatgcccgctcgccaccccggagtgctcgctgtctgagccgaacctggaagtcgtggacgcgaactccggtcatctcgcctcctgccgtcgactgcaggagatcatcgacaagaacatgaagtacacggacgtgttccccgtgcccgacctgcttcccgccgactgggccgacgtcccgcgcgaccagcgcccggtgacgctggaggtcgaccacctggtcaagcacttcccgctgaccggtggtggcatgttccgccgtaccatcggccaggtcgcggccgtcgacgacgtgacgttcaagattcgtcagggggagaccctggcgctggtcggcgagtccggctccggcaagtccaccacgctgatggagatcatgaacctcatgaagcccgaggacggacgcatcgtcgtactcggccatgacctcgccgaactcaagaagaaggcggagcgcaaggcgctgcgcaaggacctgcagatcatcttccaggatccgatgagctcgctcgacccgcgcatgcccatctacgacgtgctcgcggagccgctcaaggtgcacaagtggagcaaggagaagatcaaccgccgcatcggcgagctgatggagctggtcggcctgaaccccgactacgtggatcgcttcccggcgcagttctccggtgggcagcgtcagcgcatctccatcgcccgcgccctcgccaccgatccgaaggtgctgctgctcgacgagccgatcgcgtccctcgacgtgtcgattcaggcgggcatcatcaacctgcttgaggacctgcaggccaagctgaagatctcatacctgttcgtcgcgcacgatctggcggtcatccgccacatctccgaccgcgtggccgtcatgtacctcggccaggtggtcgagctcggcgagaccgaggacgtgttcacccatccgcgtcacccgtacacgcaggcgctgctgtcggccatccccgtgcccgaccccgtggtcgagcgcacccgccagcgcatcatcctcaagggagacctgccgtctccgtccgagaagcacccgggatgccgttttgcgtcccgctgccccgtcaagctgcggctcactcccgagcagcagaagatgtgcgagacgaaacgcccggttttgacgtcggatgaccagatagcgaccgaattcgcctgtcacttcccgctggatgtgaacgacgaatccgcgccgttctaaagtctttcgggccggtcatatgaccggcccgattgcattggtttcgccgaaaagtgaaaagtgacgccaatgttaacaaaacgtggtgtatcatcacggttctagttgcgagatattttgaaggagagaacggcacgcgcaactcgtgctgttcaggagaggaatgcaaagtatgagttttgcatctaccgcgcgtaaggtcaccgccttcgccgccgctgcagccacgcttctggcgcttggtgcttgcggcaacagcaacaacggcagcgccggcaacaacggcgccaagtccacttccgaaccgcaggaaggtgttcccaccaactacaccggttcgttcccgatgccggatccgggcaaggcctacaacaacccgaaggaccgcggcgagctgaagcagggtggcaccctcaccctgccgatcaccgagatcggcccgaactggaacgccattgacgtcaacggcaacaccgtgtacatgagcggcctgtggcgcttctatatgccgtgcatctgggagtacccggcggatggttccctggagaacatcaagccgaacaccaactacgtgaccaaggtcgagcagacctccgacagccctgagaccgttgtcttcacgatcaacgacaaggcctcctggaacgacggcaccccgatcacctggaaggacttcgagtccacctggaaggtccagagcggcaagagcgacaagttcaccccggccctcaccactggttacgaccagatcaagagcgtcaccaagggcgacaccgacaagcaggccgtcgtgacgttcgagaaggacttctacccctaccagtccctgttcaacctgctgtacccgtctgaagccctcaccggcgacgacaccaaggacggcgacaccttctccaagggttggtcgaacgactctcactccgacaagtggggcgccggcccgttcgtcgtctccaagagctccgactccgaagtgaccttcaccccgaacccgaagtggtggggcgacaagccgctgctggacaaggtcgtgctcaagcagatggagccgtccgctgccatgaacgccttcaagaacggtgagattgacgccgtcggcgcttccgacgccgagtccatgacgagcgcgaagaccgtgaaggacgcttacctgcgtcgttcctacgactccggtgtgtacacgctgaccatcaacaccaagaacatcccgctggaggtccgcaaggccttcgtccagggcgtcgaccgcagccagctgcagaagatcgacttccagggtatcgaatggaccgagaagaccccgggctccctgattctgcctcagttccaggacggctacgaggacaacatgcccgctgagtcgaagttctccaccgccaacgccaccaagacccttgaggacgccggctacaagaagaacagcgacggctactacgagaagggcggcaaggtcgcggccattacgtacacgacgttctccgactccgcctctaccaaggccaaggcaaccgccatccagaagatggccaagaccgtcggcatcaaggtgagcatcgacatcaaggcttcgaacaccttctccgacaccgtcagctctggtaactgggacatgatcggcctcggctggtccgctagcgacccgttcggctacgcgtcctccgcttaccagctctacggctccaagtccgagtccaacttctccttcaccggcaccgacgagatcgacaaggagctcgagtccatcccgggcatcaaggacagcactaaggccattgctcagttcaacaaggctgagaaggaagcccagaagctgtacgctcagatcccgttcgagaacggccagatcactgtcgccgtcaagaagggtcttgcgaactacggtcctgcaggctactcctccggcgcgcgtgtcatggtgaccgttcaccccgagaacctcggctgggagaagtgagtcgtctgattcatcgatctcattgagatagcgatatagaagtcccccgtggctgcaaagtcacgggggacttctcgtatgtgtggacgatgctggaccacccccagccggccatgccggcagcccccgatagcgggggggggttgccagccgaaggctgactgggggtggtcacgctggcagagcgggtatgccccgctcagcggcagaccttggagatcggctgccagggctgcagggtcaccggttcggaatccaccgcggcgagcgtgcgctcgtccaggtattccttgcggatgatgagctcctgaacatagcggtcgaaccacgcgccggaggcgacatagtagccgtccttgccgttgtccttgccccagctgttctccaccttccaacggtccggctcaccggccttgtcgaggttgacgccggtgagcgtcatggcgtggttgctgcgcgaatcgttgtattccagaccgtgcgccttgtccgatgcgaactcggtgccgaacagctcatccacgcgcacggtgccacgatcgaagatgccggccttgcgcagtgagaactgcgcgcagtcgcaggcgaaccagattgggtggcctgcggtcagctggtcgacggcggccttgcggaacacgtcgagcggcacgttgatgaagtccatcggagcggcctccgccacgttgcccacgaacgccagctgatagcggcggtaatacggggtagaggcgagcggggagttcgtcaggctcacgaaatcatccaaatcctcgcccacgtacttcgcgtagaactcctgcggcgtgatgccgtgttcgacgatctgcctgcgcgagtcgatgccggacttcgtgccggactcggacgccttggcgtcatccttgccctcgtccttgacgcgcagcagcagatcgaagctcgccggtggctcgcccattgcgatagcgcagatacggtacacgaccgacatctgcccggtcttgagcgagcgcagctcctcaaccgacttgccggcctgatgggcgtcgcgcaattcggcggcgaattcgcgcagcttcgtgttcaggtactgctcgaacgccgaggaatcgcgggagttcgacgactccgggtaggcctccttcggcaccagaccgtacttcttgaccagcgcgacgaacatctgccaccagccgccatcgtcagccgggccttcgttgaccgcctcgaagatgcggctgtccgtggtcttgtcgagcgtcttgagcacgttctcaaggtagaagttcgacttctccagcttgtcgtagaagaacagatagctttcggagaactcgaaatcgtcgaggttccacttgtgcatcagctcgtagcgcagcgtgttcagcgatgcgaacatccagcagcggccggaatgctcctgcgaggtgatcgacccctgcttgagttcgaccgagaacgtgcgggggagctcgcgcacgccgcgatacgaggtcgcggcctggagaatgccgttcgataccgccgcgttcgccgccacgaggttcgcgcggtccgcgttgaacgccgcggagtattccctgagctgttccgcagtcagtgccaggttgtcgggctggttggaagccatgtccatgatcctttcctattgtcggaatgaaaaactgccacgaagcagtctactccgcctacgtaggccgtgtgtgagcggggagcggaagattccggtcgaaactgcggctcgcactgtcaacgggacggatataggatggcctcatgatcaccatcaccacatccaacgtgaacggcatccgcgccgccaagcgcaagggcatcgagacatgggcgggcgagcacgccccggacatctggtgcatgcaggaggtccgcgccccgcaggacgagctcaatccgatattcggcgagttcgggttcgaatacgccaccgccggcaagatcgccgaccagagcgagctgacggcgatgaacgaggtctgccgcgtcaagggacgcgccggcgtcgggctgctgaccgacctgcccgtgacagcccggcgatacggtttgtccgggctggacgaggatgtggattccggccgatggatcgaggccgacgtgacgacgccacagggctatggaatcaccgtcgcatgcgtgtacgtgcacgcgggcaacagcgacgatccggtgaaaatggcgcagaaataccgcttcctcgacaccatgctcacgcgcatgggcgagctgcgggacgaggcctcgcgcggcggcaggcaggccgtgctgtgcggcgacttcaacatcgcgcacacgccgctcgacatcaagaacgccaaggccaacatcaagcatgccgggttcctgcccgccgaacgcgcctacatcgaccgctggctgggggagtacgagttcgtggacgtcatacgctcgctcgccggcgacatccaggggccgtacacgtggtggagtcagcgcggcagggcgttcgacaacaacgtcggctggcgcatcgactatcagttcgccactccggaactcgccgagacggcacgaggcttcgtcatcgacaaggcgcccagctatgacgcccgctggtccgaccatgcgccgctgaccgtcacgtatgacgtgtgatcatgcaatccatgacgcgctctgggccatgcggcggccgttcgggccggcgacaatccggcgtcgtcttccaagccaatcacaagccctagtgctacgctagtcacggttgcaacctgtacaacgaaatgaggaacccatgggactgtttggattcggcaagaagaagcgtgaacgcgaggaagccgaagcgaaggccgagaatcgcgaggacgaggccgccgtcgacactgaggagaccgccgccccgaccgacgtggcggacacgtacgaaggccgcggcgaatcctacggaccgtgggacgtcgatgacgagaacgtgccggattacgacgagtacctcgacatgggctcctactacctgccgtatctcgcgggcctgcagctgcgcatcaaggcgaaccgcagcacccaggagatcctcggcgcgaccatcagctacggcgcgtccagcctggagatcgaggcgttcgcggcgcccaagaccatgggtctgtgggacgacgtgcgcgccgatttgcttgaggccaacgagaaggcatccgaacacgcgggcgtgttcggcaccgaactccacctgccggtcaccgtcaagggcggcaagactgtgaacacgcgcatcgtcggcgtggatggcccgcgttggatgctgcgcggcatcttctccggcaaggccgcgaacgatgacggcaactccgacaccgaagcgctcaacaagtacttcgccgacatcgtcgtggagcgcggcgacgagccgctcgccccgcgtgatctcatcccgatgcacccgccggtgacccccgcccagcgtcaggcggcggccaagaccaatgaccaggctgacgacaaggagcacctcgacgacatcccggacaagcccgaagggccgttcgactccgatcagcagaccgaggtcaagaccacgctgtcgcgtggaccgatgttctccgaagtccgctgacgaatcccggcgctcgacgccgggagccaaggaacgagcatgaccgatcagaaccagaagaaacgtacgggtatggcgtccctcgccgccgcgggcgagggggaggacttctccgtcatcgacgccatcggcgggccgcgcggcgtcatcgaatcgatgctgccgggcgtgttgttcgtcgtgttgttcgtcgtcaccagcaacctcaatctcacgatcggtgtctccgcggcgctggcggtgctgcaggtcgtcatcaggctcgtgcaacggcagtcggtcatgggcgctctcagcggcctgatcgccgtcggcatctgcctgatatgggcgtggcagagtcatgaagcgcgcaactattacatgttcggcttcctcaccaacgccgtgtacatcgtgctgctgtccttcaccctgctcatccgcgtgcccggtctggggctcatggtcgagttcatccgtaccatccccaccgagcatttccgcgcgtggctgcacggctggctggacgacaagccgctcaggcgcgcctacacgatcgtcaccgtgctgtggatcggcgtgttcgcgctgcgtctcatcgtgcaggtgccgctttacctcgccgattccgtggcgctgctgggcacggcgcgcctgctgatgggcataccgttctgggcgctggcgatatgggtgtcgtatctgatcatcgccaccccgctgcaccggcacatcgccgcggccaaagcggcggccggcggcggcaaagacggtgacagtgacggccacaacagcggtgatgaaggtgacaacgcagccggacaggcctgatccggtcaaatcgcgaaaggaaacaatgaacgcgcaagtgcgtatcgaacgttatgccgaccagggacgatgcgtcgggcatatcgatggccgtgtggtattcgtgaggttcgccctgccgggcgagctggtgcaggtcgcattggatgaaccgcacgaccgcgacgaccgctactggaccggcgaggtcgtcgaggtcatcgaaccgagccccgatcgtgtggatcccgcatggccgctggccgggccgcttgccatgggtggtggcgtcggcggcgccgatctggtgcacgtgagcctggaagggcagcttcgctggaaggccgccaccatcagcgatcagatgagccgtctcgggcacgtggacgtcaccgtgccggtggaacgggccgaaggcgacactgagaacggcggcttgcactggcgcacccgcatcgagatgatcgccgatgacgacggcatgccgtcgatgcgtcggcgcggctcgcacaagcgcgtgccgctggacacgatgccgctcgcgacagacaacctgcttgccgtcgccgatcgcgaacacgtgtgggatggcgggttcgaacccggatcccaaattcgcctgtctgtgcccgaaccgaggaagcagcccatcgagggcaattacgccgtgctcgtggacggcgaactgcgcgccggaaaccggcatctgatggagaccgtcaccgtgaacggccgtgacttccaatacatggtcgacgcgaacggcttctggcaggtgcaccgtcaggcaccggtcatgctcgccggccatgtgatcgacctagcgaacaaggcgcttgacggcatgacctccgcctgcatatgggacttgtattccggtgccggactgttcacgctgccgctggccacgatgatcgccgaacgcacgcgcatgctcagcgtggagggcggcaagaccgcggtgaagaacgcgcaacgcaacctccgcgcgttgaacctgcctgatgtggacgcccgttgcggcgatgtgtccgccacgctcgcgcacgtgccggcccatctgtcacgccccgatctggtcgtgctcgatcctccccgcgccggtgcgcacgccaaggtgtgccgtcagatcgcgcaggcaggcgcgaaggacgtcatctatgtcgcctgtgacccgaccagcctcgcccgcgacacggcgacgctgatctcgctcgggtaccgcctgtcggacatccgggcgtacgacatctacccgatgacccaccacgtggagacggtggcctggttcacacgcatcggacggtgaggcgatgggtcgggtacgcggcgatcatgattgcgggttcctgcggcgcatgtggcgccgtgggattggcatcgcgtgcgccgcggccgcggtgatgtcgctcacctcctgcgtgccgcagggcaaggcggtcggcgatacgcaggagagcgaaccggagatcgcccatgagggcgtccaacggcaggatatcgtcgtcggcgtcatcggctccgtggacaccggcctggactctgatgtgctgaacgccttcaacaaggccgggttgaaggcgccctacgtatccaccagcatggtcgacgatccggatgccgccgcgcagcgcggagtgcggtccatggtcacgcgcaaggccaccgtcatcatgatcgacggcattgccgtcaacgagaagaacgccgaagactgggatgccgcgttgcagtccgcgcgcaaggcgggcgttcccgtcatcctcctggatccggtcgccccgcccgacgacgatacgttgttcgccgtcacgttcacgcttaccggcaagggagacggcgtgaccgccctcgacgacgccgtcgtcaccatcgtcgacgacaaaccccatccccgcacgatgaacgtcaccgacaacctgtcctgaccttccgatatccggagctcttccgcgggagcggtagtccatattttcgccccgctggcggggctgtcgcggagcgactgggggtggcttggcgtttcatcgcctgccggctattctgtctgaccaccctccggcgctgcgcgccacctcccgccggcgggaggtgtggaggcgtaggtggctgcggtgatcagccgagagtcacacctcatcctgctgcgctcgatgggggacgtgtgtgaaaatactgcctgggaatgatgcccccgttatgctgccacgggtaggctagtacgtatgaatgcaaccatgaacctgcctgaagtcgaggaaaacggcctgaccgcctcgcaagtgcgcgcctgcgaggagagcggtcagacgaacgcggtgaagagcaccacgtcgcgttcggtactcgacatcgtgcgggccaacgtcttcacgctgttcaacggcatcatcttcgccgcgatggtgctggtgctgatcaccgggtcatggaaggacgcggtgttcggcttcgtcatcctcatcaacaccggtatcggcatcgtcaccgagctcaaggccaagcgtacgttggatcggctgtcgattctcgtcacatcggattatgcggtgcgccgcgacggcgagaacacggaggttccttcgcgcgacatcgtactcggcgacctgctgtggatacgttccggggagcaggtgccggctgacgcgcaggtcctgtcatcatatgggctcgaactcgacgaatcgatgctgaccggcgaatcgcgcaccgtgcgcaaggaggacggcgaccaggtgtactccgggtcgacggcggtgtccggcgtggcgctcgcgcgggtgaacgcggtgggcgagcacagttacgcggcgacgttgaccgcacaggccaaggtatacaagaagacggtgtccgacctgaacaagggcatcaacacgatcctgaagttcatgacgtttctggtggtgccgctgtgcgtgctgctggtctggtcgcagatgaggaccgtgggcgggtggaacgccgcgatagcttcgggggagtggcggcaggccatcgtgtcagctgtagcgggcgttgtcggcatgattcccgaaggcctggtattgctcacctcgctcaacttcgcggtcgcggcgatgcggctcgcccgcaagaacacgctcgtgcaggaactcgaatcggtggagacgctggctcgcgtggactgcctcaatctcgacaagaccggcacgatcaccgatggcggcatcatgttcgatcgtctggtcatgctggaacgcatggacggcgacgatcgcgtggagagcgcggcgacccaggcgctgtatgacctgtcgaacgaggagcagccgaacggcacgggtcaggccgtgctcgacgggctgggggaacgcggttaccatgccggcccggtgcgagcgcgcgtgccgttctcgtcggcccgcaaatggagcgccatcgtcaccccggccgcagccgcggaaacggaatcggccgccgaccgcgagccgccgaccgtctggtatatgggcgcaccggaagtgatgctctccgcgctttccggagagcacggcgatgtgctcgaagcggtcaatgattacgcgaattccggcaaccgcgtgctgctcatcgcgcgggcgacgctcatacggaagagcgacggcgatgccgcaacagattcgtcatggttcacgcagtcgcccgaactgctgccggacgccaagccggtcgcgctcgtattgtgttcggagcgcgtgcgcgacgatgcgcagcccacactggcatggttccgcgatcagggcgtgcgctgccgcatcatctccggcgacaacccggtcaccgtcggcgcgatcgcggccaaagtgcgacttacaggagaccgcgagccgcatgccatcgacgcgcgcacgctgccgcaggacatcaacgagctcgcccgcgtgctggagaacgtcgatgtgatcggccgcgtgctgcccgaccagaagaaggcgatcgtccaggcgctgcacaccagtgatcacgtggtcgccatgaccggagacggcgtcaacgattcgctcgccatcaaggaggccgatctcggcatcgcgatgggcaacgccgcgcccgccaccaaagccgtggcacaggtcgtgctcgtcgattcgaagttctcgcacctgcccgacgttgtggcccgcggccgtcaggtcatggcgaacatggagcgcgtcgccagcctgttcctcgtcaagaccgtctactcggcgctgatttcgctgggcgtggtactcaccgcgatcccgttcccgtacctgccccggcatatcacgtacgtcggcgcgctgaccatcggcatgccggcgttcatcctcgcgctcgcgccgaacacgcggcgttacatccccggcttcctgcggcgtgtcgtgcatttcgcgctgccgggaggcgtcgcgatcgcattgtccgtgctgctgtcgtcgtggctgttgcccgacgtgatgggctgggatgtgaacaacgccgccgatttgtccgcgttgcgcaccacctgcgcgatcatcgtgttcgtgctgggcgtgttcatgctcgcccgcgtggcgcagccgctcaattcgtggcgcggcgtgctggttgccgtattcgccgcggccggcgtcatcggcatgctcattccgttcgtggcgaggttcttcgacctgcatctgccgaccgggcgggtattgatcgccacggtggcggcgctgctgatttccacggccctgttcgcggtctgtcacgtcatcctcgcctcggtgacgcgaattttcccacatatcaagccgacacgccagagctaaagtaacgtatcggtatcgttggtagcggataatctcttgtggaatagcatttcatttgatctcggaggaagcatgtctgtgcgagacgaccagttggcgacactgaacgtggccggcaaggactatgactactaccgcatcgccgacctgcccggcgtcgaccatctgccgtactcgctcaaggtcctcgtcgagaatctggtacgcaacatcgacggcgcgaacatcacggacgaacacgtcaaggcgctgctgaactgggccccgcaggcccagcccagccatgaaatccagttcacgccctcgcgtgtgatcatgcaggacttcaccggcgtgccctgcatcgtggacctcgccaccatgcgcgacgcggtcaaggatctcggcggcgaccctgaggtcatcaacccgcaagtccagtccgacatggtcatcgaccattccgtgcagatcgacaagtacggcgtggctgacgcggtccagcagaacatggacatcgaataccagcgcaacggcgaacgctaccagttcctgcgctggggccagcaggcgttccgcaacttccgcgtggtgccgccgggaaccggcatcattcaccaggtcaacatcgaatacctggcgaaggtcgtcatgacgaagacctccggcttggatgatggccgcgagctcgcctacctcgactcctgcgtcggcaccgactcgcacaccaccaccgagaacggcctgggcgtgctcggctggggcgtgggcggcatcgaggccgaggcggccatgctcggccagccgatctccatgctcgtgccgcgcgtcgtcggcttcaagctcaccggttcgatccccgagggcgtcaccgccaccgacgtggtcctgaccatcaccgacatgctgcgcaagcacggcgtggtcggcaagttcgtcgagttctacggcgagggcatcgcctcggtgccactggccaaccgcgccaccatcggcaacatgggacctgagttcggctccacctgcggcatcttcccgattgacggcgtcacgctcgactacctgcgcctgaccggacgttccgaggagcaggtcgcgcttgtcgaggcgtacgccaaggccaacaagctgtggggcgacgcctccgacccggactatgtcgagccgcagtactccgaatacgaggagctcgacctcggcacggtcgtgccgtccatcgccggcccgaagcgcccgcaggaccgcatcctgctgtccgaggcgaaggacatgttcgagaagaccgcacccgcctacgagaccgacaagaccgtcaaggacccggtggccgtgtccaccgacttccgtggcgatttcgacatcgaaaacggcgacgtggccatcgcctcgatcacctcgtgcaccaacacctccaacccgtccgtgatgatcgccgccggcctgatcgcccgcaacgcgcacgccaagggattgagccccaagccgtgggtcaagacctcgctcgcccccggctcgcaggtcgtggccgactacctcaaggccgcgggcctccaggacgatctcgacgcgctcggctaccagctggtcggcttcggctgcgccacctgcatcggcaactccggaccgctgctgcccgagatctccgaagccatcaacgccaacgacctgaccgtcaccgccgtgctgtccggaaaccgcaacttcgaaggccgcatcagcccggacgtcaagatgaactacctggcctccccgccgctggtcatcgcctacgcgctcgccggcacgatggacttcgacttcgagacccagccgctcggtaccgacgcagacggcaatgacgtgtatctgaaggacatctggccgaccaacgaggaggtcgcggccgtggttgacggtaccgtcagccgcgagatgttcctcaaggactacgcctccgtgttcgacggcgaccaccgctggaagggcctcgacgtgcccgaaggcgagctgttcgcatgggacgagcattcgacgtacgtgcgcaagcagaccttcttcgacggcatgaaggccacgccggagccagtcgccgacatccacggcgcccgcgtgctggcgttgctcggcgactcggtcaccaccgaccacatctccccggcgggcgcgttcaaggcgtccagcccggctggcaagtacctgaccgagcgcggcgtggagccgaagaacttcaactcctatggctcgcgtcgaggcaaccacgagattatggtgcgtggtaccttcggcaacatccgcctgcgcaaccagctgctcgcctccgtcggcgaggaggtcacgccgggcgggttcacttacgatttcacgactggaaagccttcgacgatctttgacgcctcgctcaactacaaggccgccgatattccgctcgtcgtgctggccggcaaggagtacggcactggctcgtcgcgtgactgggctgccaagggtacggtgatgctcggcgtcaaggccgtcatcaccgagagcttcgagcgcatccaccgttccaacctcatcggcatgggcgtgctgccattgcagttcccggcgggggagtcctatgagtccctgggtcttgacggcaccgagacctacgacatcgccggcgtggacgagctcaacagcggcgtcaccccgaagaccgtgcacgtcaccgccacgcacaccgacggctccaccaccgagttcgacgcagtggtccgcatcgatacgcccggagaggcggactactatcgcaacggcggcatccttcagtacgtcctgcgcaacctcatgaagtaagcggcccgaagtcccttgaccccatggtcaagggacctctttttttctttcttcccctccttctcttcctttaccttttccctcttcctttcctctttccgggagttatccacaggcgcgacacgcccggactgcattgcacaatcctcggtagcatctccatagaacggctgtattgcaatggttcggcaacgtggcatgactattgtgcggcgcagtccgggcgtgtcacgatcgagccttcgaccacattgcccgaaaacctgaagaccgggccggaaaacctgttaccgttcgtccatgtttgagatgcgaaacgaaccgccaccgaaccaatacatgcggcatcaggcgtggctcatccagcgctattacctgaagcgttgccgggcggtcagggatacgctggagcatgagccggtattcgcgttgtcgtcggcgctggggctgatgggcattgcaccgcccgagaccgccgtccttgatttaggcaaggaacatatcgtcgttcggaatcgtgacgcgcgacgcggtcatcccgccaatgtcgcatgtcatgcgtggtcattgctggacgaccgtatcgtaatccgcatctttgatctgtactgcacgtcacccgccgcgacgttcgcccaattcgtgcggttcaactggttcgaggaaacaatcatattggcggatcggctgacatgccgtgacgagcggctgaggcgcgcgaccaaacaggaactgatggatttccttgatgagcggaaggtctatggcggcaaggccgcacgccgggcgttgcgtttgtctcgcccgaacaccgattcccggtgggaacgggagctgcgtctggatgcgatgaaatggggattgccgaatccggaggcgaaccatccggtcgatttggggtctggattggcatggcttgacatggcatacgagaagtatcgcgtggcgatggaatttcatgggcagcagcatctggaacagtatgtagcggacacgaggcgcatgaacgcattggcggccaagaattgggtggtgcttccggcctggcagagtacggtgcttgaccaggccgaactgcatcgatacttcagtcaggtggccgccgctttggagcatgccggtgccgtcgattttctgcatccgcgcatggatctgtggacgttgagcggcaatccggagctgctggaaccgttttgacgtaggagcgaccgattggtatatggtccgagacagggatggcagtcgtcgtgatacgacacgcccggagtgcgcagcacgaccgccgaatagtcgctgtgaggtaacggtataaacccgttctggactccggacacaacgattgtgctgcgcaatccgggcgtgtcgtgttatgggaacaccggtgtatcgaggaaagagggaaacttgaagagagaaagtcgggaacacagttgagggggcatagaacagatggaagagagacggccggcaggatgtgggagaagtcctcggaacgggataaagaagaaccgtttcgcttacgccggcgaaacggttctcgagcagtgacggacgatcccgtcacgcgaggccggagagcttgttgatgagctcggggtctcgcgtggcgcccttgtcggcggagcgcgcgaaggcggcgtacgccttgagggcctggctcaccttgcggtcgcggtgcgccacgtagccatcgccggcctccagttcgcggcggcgctcggccagctgctcgtcggtcagctcgacgttcacggaacgggcctcgatgtcgatgtcgatgatgtcgccgttcttgatgagcgccaccgggcccttgttcgccgcctcgggagccatgtgcccgatggccagacccgaggagccgccggagtagcgaccgtcggtgagcatggcgacctgcttgccgatgcccttgcccttaacgaaggacgtcgggtacagcatctcctgcatgcccgggccgcccttcggaccttcgtaacgaatcaccagcgccatgccgggcttcagcgtgtcgtcgaggatcacctcgatggcctgctcctgcgaatcgaccaccagtgccggtccgcggaacttccagatctcctgcggcacgcccgcggtcttgacgacgcagccgtcgggagcgaggttgccgcgcagcacggcgagaccgccctcgtggatctccggatggtcgatgtcgtggatggcgccgttggcgcggtcgcggtccagcgagtcgaacagcgtggtgtgcgtccacggttcgggagagatgatgtggccgggagccgccttgtacatctgctgggcttcttcggtgcaggtgggacgcatgatgtcccagtccgccagcttggcttccagcgtcgggtagtcgatggagtgcacgttggtgtgcagcttgccggcgcggtcgagctcgccgaggatgccggtgatgccgccagcgcggtgaatgtcggagatctcccacttgccggacggcgacgccttgcagatacacggcacggtgtgcgagatgcgctcgatgtcgtcaagcgtgaagtccacgtcggcggactgcgccatggcgaggatgtgcagcacggtgttggtggaaccgcccatagcgacgtccatggtcatggcgttctcgaacgcctccttggtggcgatggagcgcggcagtacggagtcgtcggagtcgtcatagtactggtgggcgatcttgacgacctgctgcgcggcgcgcttgaacaggtccttgcggtaggaatgggaggcgaggatcgtgccgttgccgggcagcgccaagccgatggcctcggtcaggcagttcatcgagttggcggtgaacatgccggcgcaggagccgcaggtcgggcagacggtcttctcgtagttgagcagctcctcgtcggagacggaatcgtcggcggtggcgtacatcacgtcgatgaggtctgtgctcttcttggtgccgtcggcgaggatcgtggtgccggcctccatcgggccgccggagacgaacacggtggggatgttgaggcgcagcgcggccatgagcatgccggggacgaccttgtcgcagttcgggatgcagatcagtgcgtcggcgcagtgcgcgttgcactggtattcgacggtgtcggcgatgatgtcgcggctgggcagggagtacagcatgccggtgtggcccatggcgatgccgtcgtcgacggccatggtgttgaactcgcgcgggatgccgccggcctccttgatggcctcggagacgatgcggccgaccttgttgaggtggacgtggccgggcaggaactcgtcgaacgagttggcgatggcgatgatgggcttcttgcccatgtcgtcacctttgacgccagctgcacggtagagggctcgggcacctgcgaagacgcgcccgttcatgatttttgcagatcgcatttcagtcatggttctattcaagctcttgcaagggacacgcgacatgtcaagagtcggaatatggaattttcataagtgttacaaaactcacagtggattaagcctatgtagccttttatgttgtctgcaagtcggcaacgaactggcagaatccaccggacccgctccggtcgctgcgtgaggctataatcgctgcggttgagatagatttccatcatgtgattcggagacttgcaaaaatggcagaagaaaccaaggataccgaggtcaagggcaacgaggagttcggcaccgcgcccgtgcccgagggtttcgcgaacccgccgatcgacgatctgatgaagcacgccgattccaagtacgcgctggccatcttcgccgccaagcgcgcccgtcagatcaactcgtacttcacccagctcaacgagggcctgctgcagaacgtcggcccgctggtcgaataccagaaccaggagaagccgctgtcgatcgctttccgcgagatcgacgagggcctgctggaggagactctgggcgaggatgatctgagcgaaggcaactgattcgtctgaatccgtccggttcgctgtacgcggtatttgctttttctggggcgacactcttgcccttgacggcggtgacgtgtacaactgagcgtcaggagcgaacgacttggggctcgcgccgaccgaaggtctggcacgggcccttttcgtagcctgttcaggtcctgcaacaacagaatgaaccaacgtatcattgtgccttatccgcaaaaggcgggtagggcgataagtccgaaagagggatgatatgaccaatcaggagcgcaagctcatctcggccgaatctgtgaccgaaggccaccccgacaaggtatgcgaccagatttccgacgaaatcctcgacgaactgcttcggcaggatccgcaatcgcacgtcgccgtcgagacctccgccgcgaccggcgtgttcctcgtgttcggtgaggtgacgtcaaaggggtatgtcgacgtccagtccacggtgcgcgagacgctgcgccgcatcggttacacgtcttccgaggtcggcctcgatgccgactcctgcggcgtgatcgtcgccatcaccggccagagcgccgagatcaatcagggtgtggcgcgcctcaccggcgagaaggagaccgaggccagccgcgaggagcggtacgaggcccagggcgccggcgaccagggcgtgatgttcggttacgccaccgacgagaccgacgtgctgatgccgctgccgatctatctggcccaccgtctggccttccgcctgaccgaagtgcgcaagtccggcgaagtgccgcacctgcgcccggacggcaagacccaggtgaccatcgaatacgacgagaacgacaagccgttgcgcgtcgacaccgtgctgatctccacgcagcacgacccggaggcgagccgggaatggctggccgcccagctcaaggagcatgtcatcgacccggtgctggacgaggtgctcggcgacggcgtcaagcatgacgattaccgtcagctcgtcaacccgaccggctcgttcgtcctcggcggtccggccgccgacgccggcctgaccggccgcaagatcatcgtcgacacgtacggcggcgccgcccaccatggcggcggcgcgttcagcggcaaggacccgtccaaggtcgaccgttccgccgcgtacgcgacccgctgggtggcgaagaacatcgtcgccgcggggctggcgcaccgtgtcgagctgcaggtcgcctacgcgattggcgtggccgaaccggtgtcggtcaacgtcgagacgttcggcaccgaaatcggcgtgacccgcgagcagatccagcaggccgtgcgcaaggtgttcgacctgcgtcccgccgcgatcatcgacgagcttgacctcaagcgcccgatttacgcgaagaccgccgcatacggccacttcggccgcgtcgacgtcgagttcccgtgggagcgcaccgacaaggtcgaagagctcaaggccgccatccgctgactggcaaatcacagcgatcaccctcggtttcacttcgtaacgtccccgccagcgggggctgccgcgaagcgaaaccgggggtgatcttgtctatacacacaacatgcatacacagaaaagccgccggacaccccgagaaggttgccgcctgaggcggacttcaccggtggcgtgatacaaatgaaccatgagtacgaatgacgcgcagcagttggcgtttgacggcatggcgccgcgcaaacgccgcaagcgcgcgcctgccgagaagattgtggccgcggaagacccgatcgcgcaggtggtgctggacgtgcaggcgacccatctgggccagacattcgactatctcgtggaggagcggtggtcgcagaccgcacggcccggcgtcatggtgcgggtccggttcgggggcaggctcctcaacggcgtgatctggaagcgcacggcagccagcgccacgccccgctccgcgctgagatttcttgaacgggtgatcagcccgcacgtgctggtatccgaatccatgcgcgacgatatcacgcgcatcgccgacgcctatggcggcacgcgggccaacatacttcgcctggcggtccccccgcgcgtggcgcgcatcgacggcgaacagcaactggccgcgcgttcgctatgggtgggaaggctcagattctcgcacgtctcggacgaactgatgcaacggtgcttcgacacgatacaggcttcatatgacggcgccgccatgctgcgctcatccctggagggcagctcgttcgccgccctggtgatggatgcgcgtccgggagcgcgtgcgtgggctcgtgacgccgcgtggatgatcgctgccgcgatgaggcagaaccgtgccgccgtggtggtcctgcccgggataagacagtgcgaggatctcgccgttgccctggagggactgggactgtcccgtttcgcgccgggcggcgccgagcacggcggatactccggtgacttcgtcgtgctggccgcaggactgccgccggcggaacggtaccgtgcctatctggcggcggcgaccggtcaggtcgggtgcgtcatcggactgcgtgccgccatgtatgctccggtcgaggggccggccctgttcatgatggtggatgatgccgcgtaccagcaggccgacgggatgatgccgtacgcgcaggcacgcggcgtcatgcgtctgcgcgccgagtcgcacgggggagtgtttgtggcgctgtcgtacgcccgtagcccgttgagccaatgggaatgcgaggaccacacggccgtgactgccgtgagcggcccgagcgcatccgtcacgccgttgccagccgctcgcagggatcagatgccgtgggtgcggtggctgaaccgcgaggagctggcgcgtctcgccgacccgagcataggcgcccgcgtgccgcatactgcggtgacggtgttgtcgaaggccttgcagacagggccagtgctgctgtccatcccctcggacggcatgcaggaggcgttgagctgcgtgaaatgccatgcgcaggctcgttgcgcgaaatgcaccggcccgctggggcgcatgggtgatggggtgccgcgctgccggtggtgcgctgcggcggcggtcgactggcattgcccgcattgcggctgcgagcgcatgcgcgtgatacgggttggcgtaaccggcaccgcccgcgagctgggcggcctgttccgcggtgtgtccgtcgtcatatcgtcgccgagccagccgcgaggcgtcgtcgagtacgtggatgatgcgccgcgcatcgtcatcgccacgccgggagcggagcctcgcgtgctgcctgcatcccgtcaatcggagcaggatgccggcgaatatcgtgccgtgacgatcctggacgcgtggaacagtctgtatgcgccgggtgtggacgcccgcgtggacgcgctgacggcgtggatgcgggtcatggcgttgtgtgcgccccgcactcgtggtggacagggtctgctgattggtgaatgcgatcctgcagtggcccatgcgctgatgatgtgggattcggcgtcgctcgcccggaacgaattgctggagcgtgggcaggccggcatgcctccggtgtgcgcggtcgcatgcgtatgggggcgtcgggatgcggtgatggccgccttggacgatatcggcgtgctgcgcggcgattgggcctcgctggatgttgcgggggagccgatacccggcatgctggggccggtgccgatagcggctccggtgacggtgagcgaacgcgagctggagagcatgcaggaccgggtcaaggccctggtccgtgtgccggtcggcatgcgtgcccaattggccgtccgcctgcggtccgcggtggcgcgtcacatggcgtcgcgcactcccggcgaactgcggttccaaatcgatcccaaggatttgatctgatccgagagattatccgccgcgtcgaggtgtcgtttcgaggaaagcggcggcgtgacatgtctgactgccgattgaatcagcattcggaaccttttgtttcggttggtgagatgagacggggattctttgccacgaaacgtcaaaaatcgctgttttcggcattcggcccacttcttgtgccacaaaatcggatttaaccggttacatgccgtttcgagccatgagaccgaaactgggaatcattggaaaatggcgattctgttattcggagcggatttttcgtgtcggtcgcgtggcacgaaatgtcgagaacgcttgttttttgcatttcgtggcaatgtattcggtcgagaaatgcatttcacctgtgtgcaaaaccattcgggacataccggaacgtgtggtcgtggaacggcttcgatgacataaaacaacatgcgaacgaagggcggaatcgttttgaccaggccgtcactgcatccggtgccaccatgcaggccgggcctgattcgctggcggagaccaagatggccggcgaggcgcggaaggattcctctttccgagaatgctctagctcagacgggtgctggtacggcgaccgttgtcttgctcatggcgattatggcgctgattgatgtcggcgtatatgacatctgccgcgtagattcggggctgccgaaacgattcggacgagaactttcagacgcggcgcttatagttgcatgccggaatgcatcggtgcggcggatgattcgccgcgtcgtctcgatggcatggaaccatggatgtgcgcggccgcgcgccgcggaatcgttcattggaatcgttcatatggatggaggcatcatgaagggttggccgggcgaaccggatatggaacatgacgtgctggtggcgcagggacccgccgcggccgccgacggcaagccgatcagcaacgtgattttcgacttcggcaacgtgctgatctactgggatccgtccgtcgtgctgctgcccaggtattcgcaggagaccatcgaccagttcctcgacaatgacatctccggcttctacgacgcgaacgaccgcatggacggcggcgcaagccccgacgagggcgtggcgtggatgcgtgagcattacggcgacaagtgggcggatatcctgcgctactatctcgacaatttcgaggattccctgaccggcgtcgtgccgggtgcccgcgtgctcgtcaacgatctgaaggccgccggcattggagtatggggcctgtcgaactgggagaaggaattattcccgatcgcgctgaagcactgcgagatcctgcagcggctcgacggccgtctggtgtcggggtacgtgcacatgcgcaagccgcacaaggacatctacgagaaggccctggaggagttcggcatcagcgccgaaagcagcgtattcatcgacgacaaggcgatgaacatcgcgggcgcgaacgaggccggcatccgcggcattcgcttctcggacgcccgcaagctgcgcgagctgctgatcgagcagggcatcgatatcccggcggttcagtgacctccgcccgtccgcacgtcgtccggcgttcgacgatgatgacagggcagatggcctgaagtcccaataccgtggaaggaaacggaacacatgttgaaaatcctctttgccggcacgcctgacgtcgcggtgccgtccctgcgcgccctcgccgcggacagcgagcacttcgaagtggtcgcagtgctcacccgcccggacgcgcccaccggacgcggacgcaagctcacgcccagcccggtcaagactgccgcgctggaactgggattgccggtactggaatccgacccggccgagccgacgttccttgacgagctgaaggtcaccggcgcacaggccgccgcggtcatcgcatacggacgaatcctgaagcagtccgtgctggacgcgctgccctgcggctggtacaacctgcatttctcgctgctgccgcattggcgtggcgcggcccccgtgcaacgagccatctggtcgggcgacgatatgaccggcaccagcgtgttccgcatcacgcgagcgatggatgccggcccgctgctggtgcaatccgaaacgccgatcggcgagcatgagaccgccggcgacctgctgacccgtctgggagaatccggagcgctggtgctgcgcgacgcgctgcgcaccgtcgaggacggtaccgccgatcccgtggaacaggcggaaggcgattacccggtggcggagaagatccgcgtcaacgacgcgcatatcgatttcagtgcgccggtggaagcggtcgaccgtcagattcgcgcgtgcacgccgaatcccggggcatggaccgaactggatgcagacgggctcgggctcgacgacgggctgtccacgctgcacgtgctgcgggcgcacccggccgatatgaccaatccgaacgtacccgggtcgttggtgtctggggcgctcgcagctggaaagaagaatgtctggatcggcacaggctccacacctctggaattgctggaggtcaaggcgcagggcaagaaggcgatgcgcgccgccgactgggcgcgaggagcccgactctccgaagccgcgcgctgccggtaacgaggtgcgcgttgcggactggaggtaagtgaaaccacccccagtctcgctgtcgctcgccctcgcctgcacatggccctgccctttgctttacggctcggcccgccagcggggcaattatcacgctcccgctggcgggagctgtcgcgaagcgactgagggtggtcttggcgctatcgccgtgcgacgtcagcgcaggaagtccagcaccttggtcaggtcgcgctcgttgatggactcgtgggcggcgagctgagtcttcggcttggcgcagaaggcgatgccgagcccggccgcctgaatcatcgggatgtcgttcgcgccgtcgccgaccgccacggtctggctcatgggaaccccgtctcgggcggcccacgcctgcaatgcatgcagtttcaccgtcttgcacacgatattgcccagcaccttgccggtcagcgcgccatccaccacttccagacggttcgccagccaatggtcgatatgcccttcggcggcgagacggtcaacgacctcatggaatcccccggacacgacaccgaccttccaaccatgacggtgaagctcgtcgatcagcgccaacgcgccattggtgaagtgcagcttgtcgtgcacggtgtcgaacacgctcacgggcagtcccttgagcaatgcgacacgctcacgcagcgcatcacagaattcgatttccccgcgcatggcacgttcggtgatcttcgctatctcgtcgccgctgccggccgcctcgccgagctcgtcgatgacttcctcgtcgatcagcgtggaatccacatccatgacaagcagaccaggcttcgacagcgtcggcgcggccgcggtgccgtcacccatggtgtccgagggcgattggtgtgcggccgcgaacacctccacgtcgggcacgtcatacgattcgtcagaaggttgcaaagtttcgtcaagcataccgtcgattgtcggaaatcgttgggacaataccggtatgcatgaatccctgcgcatatcggccttcgcgcccgctgcggtgcacggagcgggcgactccggctccgctgtcggcgccatttccaaggtcattgtggccgtcacggacccggcgattcgccgggcgcgtaatctgatagggaagcgtgctcgaaaaaggggcgaacagtgaacgatatcatgcacgacggcactccggatggcatatggaattcgcaggaccatccgtcaggcctacctgattcagggccggtctcatcgtcgggcacgggtgccgaaagcgccacggcaccacaggacgtgaagaagatacgggagaacgtcgcacgtgagctggcggccgccaatgaccagctgatggccaagaaccatgcgctcgcgcaggcgctgtcgcgcgcgggcaaggaactcaccaaggcgaaggcgcagctgtcgcagatggcccagcccccgaagaccttcgcgacgatggtcaaggtcgactcgtcgatgaccgacgagctcggtgtccagcatgcgtcggccgagatcctgacgggcggcagacggctggtcgtgcctgtggccgccaacgtcaacgcgtcccggctgacggccggcgcctgcgtgctgctcaacgagaacatggtattggtcgagcagcgcggcacggacatgctcggctctgtccgcacgatccgccaggtgcttgatgacgggcgtctgatcgtcgcggatggcggcggcaaccccagcgtgatccggcgctcgggagcgttggcgcacgagacgttcgccaacgggcagcgcgtcatcgtcgacccgtcgggccggctcgccctggaactgctgcctgacgagaacgatgccgacctggtgctggaggaggttcccgatgtcaccttcgccgacatcggcgggcttgacagccagatcgaacgcatccgggacgccgtgcagctgccgttccttcaccgcagcctgtacgaacggtacaatctcaaggcgcccaagggcgtgctgctgtacggccctcccggcaacggcaagaccatgatcgccaaggccgtcgcccatgcgctttcggatggtttcggcaggggcagcggcgtgttcctctcggtcaagggtccggaactgctcaacaagttcgtcggtgaatccgagcgtctggtgcgtcagatcttcacccgcgcgcgcgaacgcgccgcggacggccggccggtcatcgtgttcatcgacgagatggattcgctgctgcgcacccgcggcaccggcgtctccagcgacgtggagaccacgatcgtgccgcagttcctctccgaactcgacggcgtggagagcctcgacaacgttatggtgatcggcgcctcgaaccgcgtggacatgatcgaccccgccgtgctccgcccgggacgactggacgtgaagatccgcgtggaccgccccggggcggatcaggcggcatccatcattcgccactatctgaccgacgacctgcccctgcagcccggactggacgccgacggcctgtcgcgcgttctggtgcgcgacatctacacgcgctcgtcgcgacggcacctgtgcgacgcgtgcaacgatcaggggcaatggtcggccatcttcctctccgacgtcgcgtccggtgccatgctcaagaacatcgtcgaccgcgccaagacgaaggcggtgaaggcgtccattctcggcggcgacgacgtggcgttgaacgtcgagctgctgggagaggccgtggaggacgagttcgtggagacacgagggtcggtaatggacgtcgatccggtgcaatggtcgagaatcaacggcatggacaacgggcgcgtggtccgtatccgtccggttccgcgcaaggaaaaggagaacatgcaatgaccgtgcgacgggtgatgggcacggagaccgaatacgcggtctcggcgcccgctgtctcacatgccaatccggtgcagctgtcgttcgacgtaatcggcgctgccgccgaccccgaacgttcgcgcatacgctgggactatcgtcaggaggaccccgtcaacgacgcgcggggcacccgtctggagagggccgcggcccgccccgacatgcttaccgacgagccgcagctcaacatcgtcaacgtcatcgcccccaacggcggccgcatgtacgtagaccacgcgcaccccgaatactcggcgccggagaccaccgacccgttcgaggcggtgcggtacgaccatgccggcgacctgctgatgcggcgggcggccgcgtcggcgagcgcgagaacggggcacgacatcgtcctgcaccgcaacaacgtcgacggcaagggcgccagctggggcactcatgagaactacatgatgctcagatcggtgccgttcgacacggtggcggcgctgatgaccgcccatttcgtctcacggcagatatacgccggatccggccgcgtcggcataggggagcgcagcgagaccgccggataccagctcagccagcgtgccgactacatccacgcgatcctcggactgcagaccaccttcgaacgccccatcgtcaacacgcgcgacgaatcccacagcccatccgattatcgtcgcctgcacgtgatcgtcggcgacgccaaccgcatggacgtgccgcagacgctcaagctgggtgtcaccagcatgctgctgtggctggccgagcacgcggacgagaccggctatgatctggcagcgctgctggactccatggcgctcgtcgaccccgtgtcggccatgcacacggtgtcgcacgacctgacgctgcaggccgagctgccgctgcgcgacgggggcgtcaccaacgcgtggatcatgcaggtgaggctgcgggccgccgtgtacgagatgggggcgctggtgtacggcaccgacacgcgcggcgagccgctgtggccggacaagcccaccaccggcatcatggcgctgtgggggcaggcactcgccgacgtggccgccatccggcatgccgacgacgatacgagactgaatatgcaacccgaggcgtcgcgggtggaatggctgatgaaatggcagctgctggagcgtctgcgccgcaggcacggtttgtcgtggaacgatccgaaactgcgggcgatcgacttggggtgggccgccttggacccggtccgctcgatattcgagaaggtcaggtcgcgcaccgagcgcacggtcgacgaccggcaggtcgccgatgccgctggcaatgcgccgcagaccacgcgcgcatggctgcgtgccgcggtcgtgaaccggtatgcgagccaggtggtcgctgtctcatggtcccatctgaccgtccgcaggcatgatgcgccgcagacgggggaggagtcgtacggcaatgcgagccgtccgatcgtccggccgtccgacctgtgctcgctcgacatgtccgatccgtgcgccttcgacaaggcgcacatggccgcgttcgtggacggcacgcgaaacgccgatgagctgataacgcaaatcgatcggaacatcaccgccggaaggtaatatcgatacaggcatgaaatggcattaccgtgggcgcaccactggccgatgcgcatcatggggcagccatgatggcgagcgatgacgatcaaaggcgcgaacgccacgaccagagacaacgaccgacagacgaggttgatgcagacatggatttgcgagaaatgacacaggccgtcgcccaagtggcgcggcatgccggcaggcacgcccttcaggagcaggtgaacccccacgacctatccacgacgatggtgtcgcccggcgagacgaaattcactagcgaggtcaacacccggctgattcgctatacccgcgcgcgactgtccgaaatcgaaccgttccagggcttctgggaggagcgtccggaggacaaccagccgggggagaggtactggtgcgtcggcaatatcgacggagccatcaatttcatccgcaacatggccgaatggaccgtgaccatctcactgttcgagttcgacgagcactgccatgcgcgcccgatcatgggtgtggtccatgcgcccgccatgggcatcacgtacatggcggcgaagggccagggcgccatcaggatacgccgcaaccccgtgggcggcgacaagcgcgagaaggtcatgccgtcgatcactgcgacgttggatggctccgtggtcagctacggcatgtcgtatgtgccggaggagtccaagcgggccctgtccgcggtagcctccatcgcgggtaaaccggccgatatcaagcgagtgggtccggcttcgatggatttgtgcaaggtggccgacggcacgtacgacgcctatttcgagcctcacctgcacaagtgggatgttccggccgtctcggccggcgccgtcgtggtatgggaggcgcaggggcgtctgagacagtggaacggcgagctgatccattggcgtcgcgagaacgatgtcgtggcgtcgaacggcctgatcggcgacgagctgcagccgtatctgcagtgatcgggcgcatacagacatatgcaggcgtctgccggcggtgacgaatacgtgcgtgcgtggcagatgtctgcgattcggtgacggcatgccggatgtccggcctgtgccggcatcggcggaagaagaaaaccggaaggaaagggagggacggatatgcctcaggaattcgctcacacgcggtcgtcctcgcagaagcaggacaccgacgaacagctgaatgacgtgtcgatggcggcacaggccgagaccgacgcggccgcggacgctctcgacgcggtgctggacgacatcgaatccacgctggaatccaacgccgaggagtacgtgaacagcttcgtgcaaaaaggcggcgaatgatgccgcagctgcgtgacagcggcaatcacgggagttggcaggaagcgcggaggtcttcgcagttccaaggattcgcccgcattttcggcgtggagacggagtacggcgtatcggtgacgggttcggaccgtccggtcgacgcggcgcaggtcgcgatgatgatgttccagcctgtcgtgtcccgcgcgcgttccacgaacacgtacctgaccaatggttcgcggctgtatctcgacgtcggctcccacccggagtatgcgaccgccgaggcccgcgatccgatggacgccttgctgcaggatctggcgggggagcgggtcatggccggattggccctcgacgcgcaggcccggcttcgtgccagctacggggacggcgtgaacgtgcacgtgttcaagaacaacgcggactcggcgggccactcgttcgggtgtcacgagaactatctcgtacgccgatatgtgcctctggaaaccgtcgagcacgagctgctgccgttcctgataacgaggcagctgtacaccggagccgggcgggtcaccgatcagggattcgagatcacgcagcgggcggactatctggatgaggcggtgtcatcggcgacgacgcggtcgcgccccatggtcaacacgcgtgacgaaccgcactcggatccggatgaattccgccggctgcatgtcatcatcggcgactccaatcgttcgcaatgggcgacatggatgaaactcgccgtgacgcatctgattatctgcgtcatcgaggaggccgcccggctcggtgaggattccggtttcgcgtcgtgcgcgttggccgatcccggtgccgcgaaccgtgcggtcagcgccgatctgacatgcgtgaccgcccggcttcgtcttgctgacggctccgagccggtgtccgccgtgcagatgcagcgcaggtaccaggccgtcgttcgtgatttcatggaacgtcatcatgatgccgttgacgacgcactgccgcgcacggacgtggatcagattctttccgcatggtcgctggttcttgaccagttggaggccagcgatgtggaagcattgtcggaccgcgtcgactgggcggcgaaataccgcctgttccaggcgctgaaacgccgcaagggcgaagtgacggacgccatgcgcgaacggctggacatggattaccatgacatcgtcaacggttcgctgtatccgtcaatgctgcgtcgaggcgtgatgcggcagctggccacgccccagcaggtggagcatgccgtctcggaaccgccggccgatacccgtgccgcgttgcgcggggccttcgtcgccaaggtgctgtccacgcaatgccggttctcctgcgactggacgcgattgtccgtcatggctcccgaacgcagcgaagtcgtgctgctggaccccttcgaataccaggcgaatgccgacgtccaacacctgatgaacctgctataacgccccgctggcggctgagccgtcggcgaagtcgaccggggggaggtggtgccgaccggaggcgccccagcccaagcccagatacgaaaaagcccctgactcttcattggtcaggggctgtatttgttcaccatgataacgaaatcggtgacaatggcacgaaccggacttactcggtcacggccttcttcagcagggagccggcggagatgcgcacgccgtaggtcgccgggatctcgatgatttcgccggtgcgcgggttgcggccggtgcgggcagcgcgcttgacgcgctcagcggagaacaggccggtgagcttcaggccttcgccggactgcatggcctcgacgaacacgtcctggaaagcgttaacggcggcctcagcctgagccttggtcagattggacttctgggcgatcttcgaaacgagatcagacttgttgtatgccataaagcatccttctttgatctgggggcttcgattgccgaatccccggtgttcatcaatgatgatagcgcatgatgtaggcaaacgccgcattttttaagggttttccacactttttccggttgttgggcggttatatgagattgtgtttgtcgagccagcgcatggaaagcgcaccgagagggattcgcagccagtagaacagcgcacggtacagcaacgtcgcggagagcgcgatgcccgcgggcacgcctgccgcgccgaacgagaacgtcagcgccgcttcgacgccaccgaggccgccgggggtcggcaccgcggagccgatggcattggcgaccaggaagatgaacagtgtctctagcggattggtcatctgtccgaacgccagcagcgccgcccagaattccagtccggtggccacgttgaggatcagcatgcccagcacgctgaacgacagctccttgggattggtgagtacgtcgatcagctgccgtgcgtaggccttgaccaggggcagcagcctgtccgtcgcgtaatgccggatgggcgggatcatcatcgccacggcaagcgccatcagcacgatgccgacgatgacgatcagggtgttcgtcggaatcatgctgctaagcgcgtcgctgcctgtgaatatgccgatgacgaacagcatgagcactgtgccgccataatacacggccatgacggcgctcatgatcgcggtggcggtcgtattgcggtagccgcttttgcgcaggaactgtaggttcacgaatgcgggtccgacgccggcgggcatggacaccatcgcgaatccttgcgcgacctgtgacatgaagatgccgagcgggttgcgcttgtcgcgttcgatgaaggccccgagctccagcgcggagccgagcagggcgatgagttcgaagaccaggcagacgatcgccatcaccgggttggcgttcttcaccgcggagatgacctcgtcgggcttcagttgggtgaagatcaccacgacggcgacgatcagcagcaccatgccgatgaaggagcgcgggctgaaccgggacagggacaccggctccatggcctcggcggtctcctgcggggccagcgcgcgcatctcggcgcgcatgtcgtccacgatgtgcttgttccagcccggcagggcccgcgtgccggcgggaacggccgccttctggatgaatggggtcagcgagatcatcgtgtcgtcgccgagtacgtcacggcctgcggtgaccgcgcgttcggggccgatgagcacggcgagcagcaacagcagttgcacctgatccagtgcgatgttcggggccgcgctggcgtcatccccgttctgccatccggctatgatcggcgtgccggattccagtcgcgcgagggtgtccggcgtgatgcggcgatgcgtgtacccgcgcttgttcgccaccgacaggaaacgcagcaatgcgatggcgtccttgtcggacaacgtgttgaggttgcactcgtgcatgatgtcgtcgccgtgcagcaccaggatcgaagtctcgccggtgtcggccacgccgtagaccttgggggtgggcaggcccgcattgcgcaatcccagaatcatcgccatatggtgctgggtcgcctctctcggcgagcggtcgcgccgcatggcgacgccggtgaaccggacccactgccacagctgtttgacgtagcccgccgtgcgcgcctggctgtccagagcggagacgacgaaggcccgtccccaatcatccacggcgtcgtacagtcgagatccttcgaccagatcgtcgtcgagggtcgaggcgagggagccatgggacaggtcgacgtccatgcggcgcttcagcgaggtgatatgcagtccgatgccgttgagcgcctgcacgagatcctcgccccatgcgccctggttcttggtgccggctgcgaaccggatcagcatgccgaccagccggcctacggacagggacacgataactccggtcacggagttgatcgacagcaggatcaggatggccgacgagatgtagaggatgttccatccccatttgaccgtcgatcgtgtacgccgaggccccgcgacggtcaacaatgccgcggaacccgcgtagaagtccggcagcagtcccgttccgatgatcgagctcggcgaacacagcgcggtgataagtgtgaagttcccgaaggtcgacacggccatcgatatgccccagacggtcgctaggccaccgaacatggcgagtagggccaacgccgattgcagccactcccgtcccaccagcagctggacgatggccataacggcgatggtcacgatggtcagctgctgcagcatcgaggtcggaagatcgaccatccagttcagtgcacgtccggcgctgtgggcatcggactcgactcccgtgacgaaaccgctcaggtagatggaggacagtatggccaccgccgcgagcagcacggcggagacggcgtggaccagatcgccgaaatcgtggatgcggcgcggtgcgacgtcctcgatgaccgggtgggccgtggtgccggatacgtcgtcgctcatcggacgcgcgtccggcgacgccttggaatcgtcatcgccggacgttgcggttatcgtctgatcgttcatcaccgttcctgtgctgattgatcgtcgatggaaatgggaattatcggacggctcagcggtcgaagtcgaccagcgcgccggcgacgcccgtgtaggtggcgggggtcagcgccttgagccgcgcggccgtggcggggtcgaaggactgctggtcgatgaagcgctcgaccgcctccttgctgatctcatggccgcgcatgagttccttgaccttctcgtacggcttgtccatgccgggcaggcccttgagctcgcaggcgcgcatcgcggtctggatcggctcgccgagcacctcccagttggagtcgagttcgcgttcgatgacgatgtcgttcggatggatggacttgagtcctcccatcaggttgtacagggcgagctgcgagtagccgagcgccgaaccgatgttgcgctgggtggtcgaatcggtcaggtcgcgctgccaacgggactccaccagcgtggcggagagcgtgtcgagcagcgagcaggacagttcgaagttggcctcggcgttctcgaagcggatcgggttgaccttgtgcggcatcgtggaggagccggtggcgcccttgacgggcacctgggcgaacacgccgcgcgagatgtacatccacacgtccacgcacaggttgtgcatgatgcggttcgcgtgggagacggtcgagtagagctcggcctgccagtcgtggctttcgatctgcgtggtcagcgggttccaggtcaggcccatgcggttggtgacgaactcgcgggagacggcgatccagtcgacgtccgggcaggcggccagatgcgcgccgaaggtgccggtcgcgccgttgatcttgcccaggtactcctggttctcgatgtgcctcagctgacggttcagacggtagacgtagacggcgagctccttgccgagcgtggtcggtgtggccggctggccgtgggtgagggagagcagggccttgtccttgtattcctcggccttggcggcgaggtggtcgatgatctccttgaacgccggcgtccatacctgctccatcgcgttcttcacgcaacgggcggtggacaggttgttgatgtcctcggaggtgcaggcgaagtgcacaagggtcttgagcgcgtcgttgatgtgggtgagctcggccggcgctttgtcgagctggtcgtcgatgtagtattccacggccttcacgtcatggtgggtgacggcctcgtgcgcggcatgctgcttgatgccttcggcgccgaagtcctcggggatggcccgcaggaaggcgatctcggcgtcggtgaacggctccacgccttcgacgatcggctggttgccgttgccgtcgaagccgttggccagcaggatcatccattcgacttcgacgcgcatgcgctcgcggttcagcgccggctcgctcagatattcgacgagaggtgcggtctgcttgtggtagcgtccgtcgagcggggtcaatgcaattgcgggggtgatgtcagtaagcttcatagcatcccagattacttccagccgtaaacctgatgcgaaaccgatgcgtgttcgtttcgcccccgttcctgatgccttcttcgtcccggcatgtcgttctcctctcgttttcatctgctgactgctgtttcccccgtgtttccggtgcgtgcacgcccgtcagtcatgcgacatgcgcccctcgtagtatcgggtgtcgatgagttcgccgtcgatgatctgctggaaatgccgttcgtgcgcgtccacggcgggcgagccgagatcggtggcgttgcggtacgcggcctgatggtatttgagccaatgggatatctccttggtcttcggcgcgtcggccaccagtgctccggcgtagttcgactcgaccgaaccggtgttctggccgggcgtgcacgacccgtcggcgttcaccgtcggcggcgtgacgccggtggtctgcgtgactttgccccttacggtgagccattgttcggtcgaagggttgcggccgccatcgagcgaggcgacgagctcgtcctcgatctctatgctggtcacccaggtcttgggcggtatcggatgattggcgacaggagagccggcggtcaccacgtgatcgatggcgtaggagtccttcaggtcggaggccagggccgcggccacgatgccgccctgggaatgccccaccaatgccaccggctcgtccttgccgatgccggcttgtctcatggcttcctcgaccatgcggaagctgtccgcgttcctgcgtcggttggcgttggagctcatgagttcgaggttctgctcccatccgaacggcgaatcgtcctgcccgtccgtgcccggtatcaggattagccagcctgtcgtcccatcggaacggcggtatcgctggaccgctatcgtcgcataactgagtccgctgttaagggtgatcttgcctaggcgttcctcggcgagccgtcggaggttttccatggacgaggccacggaatgcgaggccctggccacctgagacgtggattgcacctcacgcacggtgagtttgttgccctgcatggcgttcttgaacttcgacgtgtactttgcgatgcgttccgcggcgccggcgacctgggtaccgccgaggatgtgcgcgatgcggttgttcgtgatgcgtcccgccagcgatgccagcagctcctcatccattttcgatgtggcatcgagcgcccgcacggggttgagcttgccgtccttgatggagcccgagacgaatccgtagagcgacagcatccccagcgtgttccatccggcgctgggcagcacggtcgtcatgatctgcgcggccttgcgaagtttcgtctccgccttggtctccgcttcgtcatacaggctgtgggcgcgggcgatcagatcggcgacctgttccaggtccccggcgagcgtggcgcactcccgcgcgtgggtgacgcattgctccagcagacgcgcatatggcatggagacgtgaccgggttctccatcgccgccgctgccggccagcgcagggcagaacgccgcgcccgcacggtcctttcggagctggtcgtggaccaccgaccagaagaaccccgcgcccttcatctccttcgcctgattgcgcagcgatgccacggcggccgtatatcgttcacgggttgccggggcgtattgcgtgcctccgtgtatcgacgaagtgaccatccagttcatgatgagcctccgctccaggcgagttgcccggtctgccgcacgcggtcgtcgatggatgccgccaacctcgtatcgcggtccaatgttcgtgcgcacagtgtcgccgcattgccggtccaatccaggttcttggcggcggccatcgcggttctggactgttccagcgcgttggaggtcagccgttgcagggagccgatgcgctcccggctggacccgacagcggtgcggcaagggcagtcggcgccggcgatcgacgccatcgcgttcccccatatcgggaacgcgccgttgaagatagtgcaggtgttcatggttccatgaacgcatgcacggccatccgcgcgcaagcggagcggaacatgtggtcgaaggctcccgacttatccacacactcggcgtgtcatccacagcaaatgtggacgacgagaccggcgccgtcgcggagcactgaatggagtgatgcgcaatggtgccctcgctggcgggctgagccgtgaagcgagtagaggggctgtttgcaggcgaagccgcctggggcggtcccgggtgcctctcatccgcagcgccacttgtgccgtggcccgtctttccatcaggggagaatcgacctgacttcgccgccgattgccgtgctaaggatgctgtgccgggatggccacaccagggggaaaaacatgggaaaaatgcattgtgtggcttttgttgtgccacacaatggaatgtgagccttctcattacgtggtatggcagaaagcgaatcacagaaaccgccattttccaatgattcgggaaaacgctctgataccggcgttgccacaccagcccaaaaaccgtcgaaaatcgtgtggtgtggtacacgggcagccggaaccggacagctggaaccaggcggcgcccgggccaatcaccatggcttggtggtggagtttgtgttggaggagcttttgcccttaccgcctttggagccgttctgcgagttggactgctgattcgacttcagtaggtcgtccacttgcttgcgctgctcctgcgtcagaccgccgctctgcttggcgttgccgtccgatccgggcgcggtctgcgcgttggaggtttcggtgttttgctgcttctggagctgcgcgttgatgcgttcggtcagcgtggcggagactgacgcgttggtgtcgatcacgttcttgacttgcggcagtagcaacgcggaccatgcggccgcgtctgcgaacctggcgtcggctttttgctggagtgcgctgagcgtcgacaggtcggcgtcatccttggaagcggccttcagattgccgttcagttgcgaggtggcatcgtcgaatgcggtgacagcgatgaggttcgcgccggccgcgatgcccgcgcacaggcaggccatcgcgacgatgccgatcaggatgcgcgaccatagcggagtgcgcgctactgcgcggtctttcgcctcgcggccgttcgcctcgcgcttcttcactgtgttgcttttcatcgcacgattcgttgatttccgggatttcatagcatcctccgtgacatggcgatccatgcgccgatctcccaggcgagcagcaggcccagcgccacggcgaacggccatatcacgggaatcgtacgctcccgccgtttgaccgtctgggtgagcctccactgtcttgatgccttggcggacacggcctgttcgatggtgtgcgaggcgtccacgtgcaggtatgagccgcccatctcatcggcgatggattccagcgtggcctcgtcgagcttggatattcctggcttgccggtcgtcgggtcggtcacccactgcccgtcggattgctgtcccgttgctgtgccgtcgctggccatcggtatcttgccacccgcatcagagcccacgccgatggtgaacgagtcgtcaaggtaccgcctcagcgcagaatagctacggcgtgcggtgtcggaggtctgctcgccgtccgtgatcacatacagcacgatgatgtcatcgggatgttgatccctgattgatttgagcgacagcatcagctggtcgagcggcgtgtcgagactcgatccggccgatgtggacgtggattcgacggccagcgtgtcggcccagccgtcaatggcgatggagtccggagtcaacggcacatccagggtgccgctcgcgccgaagcgcaatgcggcgaaactggaatcggcgtacgtcgacgtgatgcccttcacgatgcgcttggccgcgtcaagacggctgattgtacccgaggagccgtattccgcgtccttgaccgccatcgatccggtgacgtcgaccgccaccatgacatcggtggcattgatagcccggctggtggtggtcgtcacgatgctgggcgtcagcatcatcacggcggcgagcaggaacattatcaccctgcgtatgcaggcggtcagcgtctcatcgctggagcgcctgcgccgcacatgcacgacgaccaccgcgaccgcgaacgccagcatgagcgccgcgatcgcgccgcccgcgatccaacccagagccggggcgaatgtcatcgatctcatcgtctcaacctccatgccagtatcatccatatcgcaagcagcacgaccagcatcagcgtccaccatcccggcgcgtcgatcagcgcggcctggcttgaccgtcggctttcgctggtacgccggctgtcaatctgcctcaccagctcgttgatgtcggatgagcccgactgggtgaggaacgttccgccgcgggactcgatctgctgcttcatctcggtggttgtggcgtcgccctcgctctggcgtggcccggagaacaggccgtccacgctgatatgcgaggcttcggccatatcgagcgcctgggcgagtgaatacgtcggcgtgccggacgccacgttgtcggtggcgagcacgatcgaggcggggcgctgccgtgtggcgccggacgtgtcgccataggcgaagccgggtatcatcgcggcgcagctgaccagcccgtccccgatcagggatgtcgagttcttgcggttctgcgtgccttccagccaatcggcgatcttttggtagtccttgtcgctcatcttgtcgatgtcgtcctgcgattcgacgccacggagcgcatccgccgccttggtcagctggctggagaccaggtcgtagtcgtcggtcagggggaacaccgtgcgcgatgtcgagttgaagatgctcagggcgatgcgttctccctggaaatggctcaccagttccagatatgtttcgatgaccgcccggtcataggggagcgccgaacctgacacgtcgaggcacaacacgatgtcgcgactgctggagcgttccgcgtcgcggtccacatgcgccggtctggcgataagaaccgtgcagatggccagcgccgccaccagcgccgccacggcgatccgcccgagcaatcgccacagatggaacagatgcgatgcatgctcggtattgaggtcgtcgtcaagactgtataccggcatgccgtcccgcgggggacgcctgcggcctcggaagatcgcgatgacggccaccagcactgccgcgacgagcacggccgccacggcggcatacggccacagccaatggatgctcatgtcgttcgtggtcatcagcgccacctttccacgaggttcagcacccagtcggcggcctgttccacggtggcgtccctcgcctgcgcgttgaactcggcgttcgcgaactccggcggatacagcgcggctatggtctggcgcagcagcgtgaaaccgtggactcccgaatcacttgccagggagcctgcggaacgtgacgcgatctcctgcagcgtcgtcgaactgagctccgcgctgctggcctgcgacgcgaagtccctcgccacggcggcgagctcgacgaaggcgtcctcgcgcgagagcttcccggccccgttgcgctccacgatgtcatgcacgcggcttttccactgcgagacgggggcgagggcgttgtgggaccctcggggagcggctacgcgtttcgcacgtcgaggacgggacatgatgacgatcgccacaatcaggatcagcaacgcgatgaagcacgccatcgtcactatgggcagcagagacgcgacgggcacgtccgtcacgggatgcaggtcgttcacgtccacggctgcggccagcgtcgacgaggtcacgaaaccgttcatgacgttcatgcaggcacctccgacgtcaggttcagcgatggcggcacacgcagctgattgcggatggaacggccgagcgaacgcgacaccagtcgcacgaaagcatcgaacatcatgtcgctcgacgcggcgcggatcattcgcgaaccacgtttggcgagttcgtgctccagagcggcgcacacgtatctgcgatgcagcgccacctcttccgcggccttcgcgttgcgcagcagggcggggatgcggcgcccggattttccgtcataccattcgcgggcggcctcggacgggtcgaaggggttggccgtcgccacggtgatcagcaccacggggtgggtggcggctatggcgccgatgacgtcgatgtgacgcttgcgcagggccagctcgtcggtggcaagcacgatgagcgcctgacggtcgcgtatgcggcgcgcgtaatccagcagagcgtcgatgttgcggccgtatgaccaatcccgccgcaaggcgttgtccagcgtgcgctcgaactgcgcgaacccgccgttgaacggcatgcgcgtgatgctgtgggcgtcggcgaacaccagggagacgtcatcgctgcgccgcagcgacagcgcggcgaacatgcgcagcgcgttgcctgcgaccgcgtaggccggctcgcctgacgcgcatcctccggtcatctcctcgccgacatcgcacagcagccacacttggctggtcgcctggcgcgcatgctgcacgaccatcgggcgaccgagacgggcgctggctttccaatcgatgagacgcgcctcgtcccccggcccgtagacgcggatgtccatcgggtcgtcattgcctccacgccggttcgaggcgtgctcgccctccaggacgcccagcgccttgcgaacggtcggaaggctcagcgaattgcccagcgcctcgatcttcctgcggatccggtcgtcggaagatgaggagtgtgaggggtgtgagccatcgatcatgggacgtgaaccgtttccacgatccgatcgatcacctgatcgctggtcacaccgtcggccagcgcctcgaaggtcaggatcacacggtgcctgagcacttcgtggaccatcatcttcacatcctcggggatgacgtaatcccggccggcgagcagcgcgttggcctgcccgctgcggatcagggcgatcgacgcgcgggggctcgcaccgaggcggaccgtcgagctcaggcccttcagcggcttgtttccggcaccgcgcgaggtcgccaccagatcgacggcgtagcgcatgatcgcctccgacacatggacgcgccgcgccgatttgcgcagaaactccacatcctgaatggtgatcgtgtcggacggcagtgatttcggatcgaacatgtcggtgccgcggcgcgtgagcatcgccagcatgctcgtctcctcgtcggccttgggataggtcatgacggccttcatcatgaatcggtccatctgggcttccggcaggttgaacgtgccctcctcctcgatggggttctcggtggcgattaccatgaacggcttgggcagctcgatgcgttcgccgccgatcgtcgtggcgccttccgccatggcctcaagcatcgccgactgcgttttggcgttggatcggttgatctcgtcgagcaatacgaaattggcgtggatcgggccgatctgggtggagaaccgctgggtggagaagtcaaacacctgggtgcccaccagatcggacggcatgaggtcgggcgtgcattgcactcggcggaacgttcccgagaccgaggtggccagcgtctgggccgcggtggtcttggccaggccgggcacggattcgatgaggatgtggccgcctgcgaccatcgtggcgatcagcgcttcgcgcaagtcggactgtccgaccagcgtctgggcgaatctggcgcggatgcggtcggtgagctgccgtgcgcgtcgcaggtcatcctgcgtcagcgcggcggaaggcgccggcacgggcgtgcgcatgggggcggccggcatggcgcccgtcgtggggatcgcgttcgcgagctgggacggcattgaaggtttcgaggtgaataaagccatgctgcccaccttaccgtgacgaagcaaccgcggagtggggatcgggccgatccgcctgcgccgatggcagtgaccagtcgaccggttccgcgcccatggagaccagtgcttggttggcgcgggagaacgggtgggagccgaagaacccgcgggatgcggacagagggctgggatgcggcgaggcgatgatggtcgcgttggtgagcagcggcgcgaggctctgcgcgtttcgcccccagaggatcgccaccagcggcttcggcttgccgtccgcgtccacccgggcgttaagggcgcggatggcggcctcggtgatggtctcccatcccttgccctgatggctgttggggcgtcccacgccgacggtcaggcacctgttcagcagcatcacgccgcgctgggtccaaggtgtcaggtcaccgttgtcgggcatcggcacgtgcatgtcgtcgacgagctcgcggtagatgttgaccaggctcttcggcagcggtcggacgtcgggcgccacgcagaagctcagaccgaccggatgccccggagtcgggtagggatcctgcccgacgatcagcaccttgatcgagtcgaatggaattgtgaaggctctgaggatattatggcttgcgggcaggtactgacgtcctgcctgcagttcggagcggaggaaatcgcccatgtgatggacctgcggctccacgtcctgcagcgctgcggcccatccgggctccacgagctgcgacaatggtttgactggatgttgactcatgatctctactgtagcgagcgtgtcgaagctgtgcatatccggtgcatgactgacggccgtcgcgcacttgggacaccatggccggtagacttgacgaacgatacggaagggtgattatggccaaggacaaggaaacatacgattcgtatgccaaagacgtgttcgacaatcctccggcaggtccggtgggcgtgcatcggggcgcgcggtcggccggggcgcgcatgacgcctttcctgatcgtgctgcttgtggtggccctggcgggcgtcggcacatggggtgtgctgtcgggaatgttctccgacgtgctcttcgggaacaacggcacgtcgcaggcggccgacgacaaggcgtccgacagcgacgactcgaagaccggcgacacgacgaagtccggcacgggcgagcagtccacttctagttcgactgacggttcctccgacacggcttccaatacctccacggattccgcccagagcgatacgacatcgagcagcagcgacggttcgaccgatgccaccgacacgaacgggcagggggcggactccaccgcctcgtccgacgcgcagtcgacgccgccggccaccgccgaggcgaacaaggccacttccgtccgcgtgatcaacggaaccaagatctccggtcacgccgccagccgtgcgtacacgctcaagcaggccggatacaagaacgtcgtctccgccaacccctccggtacgttgcccgcgagcaccgtggtctggtaccagaacgagaccgatgcggcgaccgcgaaggacatcgccgtgaccttgggcatctccgacgtgcggcagatgccgggcatctccgcgcccgtcgtcgtcgtgctgatgcagtgaccgtacatcggccgagaatccgcgtccccgtagactttgtgcgaatgtcccctagtaccgtacaatgatatggagtcgcgaggtgggggatgcggtgcggttttgagctctcttccgcttgttcgcggcataggaacaagggaaagaatataacaatggcacagggaactgtgaagttcttcagcgctggcaagggttacggattcattacctctgatgctggtggggatgatgtgttcgtgcactactcggttattcaagctgatggtttcaagacgctgaacgagggcgataaggtcgagtacgaggccgaacgtgggccgaagggaatgcaggccacgaaagtggtcaagctctgaatcgtgcgaggctttgctcgtcatcgaagctccggtacccaatgggtgccggagctttttccttttctttcggctttaccggatcggtatcggcatgctacggccttcgcggatcacgcgatgatttcaagccaacagcgcaatcctcgtgaatatgttggcactcgggcaccgagagtgctaatctcccaattagcactcggggagtgagagtgacagccggcagctgacggtcggcggccacgcctcgcccccaggtgagattcagtaccgtgaagccatttggaggatacacaaccatggcaaagatcattgcatacgacgaggaagctcgtcagggcatgcttgcgggtctcgacaagctcgccaacaccgtgaaggtcactctgggcccgaagggccgcaatgtggtgctcgacaagtcctatggcgcaccgaccatcaccaacgatggcgtctccatcgccaaggaaatcgatcttgaggatccgtacgagcgcatcggcgccgagctggtcaaggaagtcgccaagaagaccgacgacgtcgcgggcgacggaaccaccaccgccaccgtgctggcccagtccctcgtgcacgaaggcctgaagaacgttgtcgccggctccaacccgatcgcgctgcgtcgcggtatcgagaaggccaccgacaccatcgtcaaggaactggtcgccgccgccaaggacgtggagaccaaggaccagatcgccgccaccgccacgatctccgcagccgaccccgaggttggcgagaagatcgccgaggctctggacaaggtcggtcaggacggcgtcgtgaccgtcgaggacaacaaccgcttcggccttgaccttgagttcaccgagggcatgcgtttcgacaagggctacatcgccccgtacttcgtgaccaacgcggacgaccagaccgcggttcttgaggatccgtacatcctcctgacctccggcaaggtttccagccagcaggacgtcgtccacatcgccgagctcgtcatgaagtccggcaagccgctgctgatcatcgccgaggacgtcgacggcgaggcgctgccgaccctcatcctgaacaagatccgcggcaccttcaactcctgcgccgtcaaggcccccggcttcggcgaccgtcgcaaggcgatgctgcaggatatggccatcctgaccggtgctcaggtcgtgtccgacgagctgggtctcaagctcgactccatcgacatgtccgtgctcggcaccgccaagaaggtcatcgtctccaaggacgagaccaccatcgtttccggcggcggcgacaaggccgacgtcgaggctcgcgtggcccagattcgcgccgagatcgagaagaccgactccgattacgaccgtgagaagctgcaggagcgtctcgccaagctggccggcggcgtcgccgtcatcaaagtcggcgcggccaccgaggtcgaggccaaggagcgtaagcaccgcatcgaagacgccgtgcgcaacgccaaggccgctatcgaagagggcctgctgcccggcggtggcgtggcgctcgtccaggctgccaagaaggccgagtccgcagaagccgtcacttcgctgaccggcgaagaggccaccggtgccgccatcgtgttccgcgccatcgaggccccgatcaagcagatcgccgagaactccggcgtgtccggtgacgtggtgttcaacaaggttcgcgagctgccggagggtcagggcttcaacgccgccaccgacacctacgaggatctgctggccgccggcgtcgccgacccggtcaaggtcacccgctccgctctgcagaacgccgcgtccatcgccggcctgttcctgaccaccgaagcggttgtcgccaacaagccggaaccgaaggccgccgctccggccgccggcgccgacatgggctactgatccgctctcggaatccgccatcgcagcgcggtagcgcgttgcagcagcggatgccgtaacacggatttgccgcgatgtgaagggcttcgacctgttgagggtcggagcccttttcgtatgtctgcgggcgtaccggagcggatcaccgccgtgatactgttcagccggaagcgaacagtcgggacgcctgcgcttcggcgtcggcgtagacggtggatgcctgggtgagcgcctgctggatggattccagcgacgcctccatctgctgctgtgccgcacgccactgcgcgctcaccgaagtgaactgcgtggcggcaccgccacgccaggcgtcctggagaccgttgaggttcgtatacattccgttgaccgcctgccggatggcggcgatggacgccgaaacggcggcggaggaggattggatccgttcggaatccacttgatattggggcatggttgttcctttcctgtattgttctgttttcgcccggtgacgttgaagcgtccggccggtaatgtggaggatatgacattgcgaacgatgagatacggaaaaacggatgatgtggtcgaaggctcggccattttgggggttatcggcgtgtcgcgcgacggattttctctgtggaaacggctgttttccgcggttttgacggtgctggtcataacaatgtggataacttcgcccggtgcggtcgcatacgccgccggggacgattcgtcgtcctcggaccaggggcaggccacgttctcccaggacataaccgatccctacaacgtgctcggctccaatctgacgaaagttacggacgccatatccagcacctacgacagcaccggcgtgtcggtcaagctgtcatacatgctgcatttcgagggggtagaggaccccgaccaatgggcgcaggaggcgttggacgccaccaaccccaaaccgaacaccgtgctgctggccgtggccctcaacgacggcaagctcgtggtcgccgtctccggcaactcggaatcgtggctgtacaacaagaccacgtcggaccagctgctgaaaagtgcctacgggccggtcagcggcaggaaccccgactggtccggctcggcgatcgccatgatggattccatcgccacgatcaagacgaccacagcgcagcgcggcacggtgtggaaatgggtgggcatatccgtgatgtgcggcgtgctggtggttctgatcgtcatcggcgtcgtgacggtggttcgccgtcgtcgcgatacgaagggcaagcagccggatgccgagaaggacgcaggaaaatccacagagaaagccacgaagaaagacacgggcaagtccgccaagaagcggcgctccaagggtgatgcagccgagtcggactccccggcggaggacgacggcaggccgcagtccgcttcaagtgaatccgacgagcagtccgctccgtccgtacccatgacgcgccgcgaacggagggaggcatcccggcgcggaaagcggttcggaacgtcgtccgccgccaccgcgcccaagccgggcaacaccgacgaagccgccgacgaaggctcccgggagcgtttcgacgcatggctggcgtccattgtcccgcaagacacagatggtgttcaggaaacatccagaacatcgagtcaagctggtaaccatgagcaagccgattgaagcatccattgttgttgtcgacgacgaaccgtccatccgtgaactgctcgtcgcatccctgcatttcgccggattcgatgtggccaccgccgcatcgggctccgaagccatcgaggtgatcgagaagacccagcccgacctgatcgtcctcgacgtcatgctccctgatatcgacggattcaccgtgacccgccgcatccggcaggagggcattggcgcccccgtgctgttcctcaccgcccgcgacgacacgcaggacaaggtgatgggattgaccgtcggaggcgacgactacgtgaccaagcccttcagcttggaggaggtcgtggcccgcatccgcgcgattctgcgtcgcacccgtgagcaggtggaggacgatccgatcatccgcgtcggcgaccttgagatcaacgaggattcgcacgatgtgtcccgcgccggtcatgcgatcgatctgagcccgaccgaatacaagctgctgcgctacctgatggacaacgagggccgtgtgctgtcgaaggcgcagatcctcgatcacgtctggcaatacgattggggcggtgacgcggcgatcgtcgagtcgtacatctcgtacctgcgcaagaaggtcgacggcatcatggtgaccgacgacaacggtgaacagcacaaggtcaccccgctgatcgagaccaagcgaggcatcggctacatgattcgcgagcccagagtctcggcgtgaggcgggcgcgatgaccgcacagacacctccgccgacgggtgacggaaccgccgcaggcccggccccggcaccgggaaccgcgccgaccggcacggtcgggactccgggaaccgcgcagatacctccgccgacagccgcccctgcgagccagaagcgtgcgacccataccaagggtgtgtgggcgacactgaaatcgatgttcgtcgggcgtctggacgccgttccgctggccaccaagatcgtggcgtgcacggtcatcctgctgatcgtgggtacggccggtatatcactgacgttgcgccagctggtcggcaactacatgctggagaagacggacacgcagctgttccgtcaggcgcaactggtcctcaacaacatcgataccatgcgtcagcagaataacgccgagaaatccagcagcagcctgctgtacagctacttcgtgcagatccgcgacagcgacgacaccatcttgcgcaacgccatcgtccccactctcaaggacggcgtcagttcgatgccgttgctgcctatggacggcagccgcggaggcgtgcagctccagcagccgttcaccaccaacgccgtcgtgacgttgagcgggcggagcgtggaccattccacgctgtccaccgccgaatcgccgtggcgcgtcgtggcgctgccgtggaccgatgaggacggcaagcccggcggcgtatgctacatcggtctgtcgctgagcgaccagcttgacaccgtaaagacattgacccgttactgcatcatcgtcggcgtggccatcgtcatactcggcgccctgctggccacgctgatgacccagagaacactgtctccgctgaagcgcatcgagaagaccgccgcgaagatcgccgccggcgacctcacacaacgcgtgcccccggcgccggagaacacggaggtcggttcgctgtctgtctcgctcaacgccatgctcacccgaatagagcagagcttccacgagcaggaggagaccacggcgaagatgaaacgattcgtctccgatgccagccatgagcttcgcacgccgctcgcggcgatccacgggtatgcggagctatacaagatgcagcgtgacctgccgggtgcgctgggacgcgccgatgagtcgatctcgcatatcgaggattcgagcacccgcatgacggtactggtggaggacctgctgtcgttggcgcgcctcgacgaggggcgtggcatcgacatcacccagcaggtgccgctgaccacgctggtcacggacgcgaccgaagacctgcacgcgctcgatccgggccgtgagattcgccgcggcacgctgacattccagccgcgcaacggggatgagccggccgatctggagttcgtcgaaggcccgctgcccgatgtcacgttgaaaggcgacgggtcgaggctgcggcaggtggtcaccaacatcgtcggcaacatccaccgctacacgcccgccgactccccggtggagatatccgtcggcgtcatgcccgcgtcgatcagccccgaatcgttggcccgcatgtccgcgaatgacgcctcgatgcgctacttcatcgaagccgtggacgtaagccgctccatgcagatgggcatgaactacgcggtggtccgcttcagcgaccatggtccgggcgtgcccgagaactcccgctccaagatcttcgagcggttctacaccgcggacccgtcccgggcgcgtctcaaaggcggcaccgggcttggcatggccatcgcgcagtcggtggtcaaggcgcacaagggcttcatctgcgcgaccgactcccagggcggcggcctcacgctcacggtggtgctgcccgtagcgccgctggagccgaagatcgccgtgggcgaaccccctcaggacgccaaggcggaacgcaaggccgaacgcaacaaagccaagcaggaaaaacagcaggcgcggcagcacaagagcgagtgattcgcgtccggtgcgctgccgcgtgccgtgcgttcatgcattgaggtaaactgatactttgatgtattcatgagcagatcgagaatctgccggtccgacgagtaacgaggtgtgccatgcccagtgggcgcgtacgttggttcgacgcgaaaaagggattcggattcattacgaacgacgagagcgaggacgtgttcctgcccgcagcggctctgccggatggcgtgaccaccctgcgcaaaggcgcccgcgtggagttctccgtgatcgacggccgcaaggggccacaggccatgggcgtgacgctggtcgcatccgtgccgtccctggtcaaggcgacccgcccgaagccagatgatatggccgccatcgtggaggaccttatcaagttgctggattccgcgggcaacgagctgcgtcgccatcggtatccctccgccgccgacagccggaagctcgccacactgctgcgtggcgtggctgacagcttcgacgtgcaggaatgaggggacaggggatagtacatgcctgaaacgaccatgcctgagacggttgtggacgaacccggtatcgcggattcgcccatcgcctccatcgacccgaaagacgctgcccgtgccatggccgtcgaggctgccgaggacgagaacggcgtcggagagttcgtcgaggccatcgacgccggtgacggcatcaccgattaccggttcgtctcgctgatgcgcggctacgagggatggcagtggtccgtgacgatgttccacgatgtcgaacgcgacacgtggacggtgaacgagtcaacgcttattcccatggaacaggcgctgcgccctccggaatggattccatggaaggaccgtctgctgccgaccgacctgtcggtgaccgactccatcggcaccgacccggatgacccgcggttggaggaaggtttccgggcgaccgccgaagccgagaccggtgacacgcgcgtttcggatgcacgggacgtggaagcggccggggccccgggcaaggtcgatgccgcggatgaggcatcggataccggagcatcggattctgaggcgcctgacagcgagcctgtggagtcccaggacgctcagcccaccacagctgcggaggatgtcgatgacgcggtgagcgcattcgatctgtcccgccgccatgtgctgtccccgctgggccgcgcccagaccgcgcagcgctggtatgcgggccctcgcggccccaagtcgttgtccaccaagaccgcgtcgggcaatctgtgctccacctgcgggttcttcgtcgcgttgcagggcgatctgagcgaaatgttcggcgtctgcgcgaacaagtggagcccggacgacggcaaggtcgtctcgctcgaccacggatgcggcgaacattccgaaatcgagccgcccgagccgagccacatgtggattcaatccaagcccgcgttcgacgacctgcatatcgatgtcatcgcgcaggcgccgcgggacgagcgcggcgaagtggagctgatcgagaagctcggtgccgccggcctgccgttcgacgtgcccaagggcacgatcatcctcaaatcccagctgcctgaaacgcgctgacccgaatcgcctgcaacacgggcaacgtcacggcgaccgaatggcggaatgacgatggaacgataatcgcctgtgacaccacgcgaagcggtgtcacaggcgattcgtctatatccggggttgcgcatccgggccagcgcgcgatggcgctcagtgcacgatggtgaccgtgcactccgcgaagttcaggatctgcctcgacacggaaccgaggaaacgggcgtccaagccgctcaggccgcgggatccaacgaccagatggctggcgaaccgggatgccgtggtcaggcccttggccgccgcgatgtggaacgccttgcccgtcacctgaagcccgtcgggaatatcggcctgctcgatcatgcgacggacgatgtcctgcgcgtgatcctgaccggcgccgatcgaggcgatcgcgttctcatagccgggtacctcgcccagatccttcagctgccagcagaacatgacctgcagtggggcgtgatgcagcgcggcgaaatcaatggcgaaccgcaacgcatgacgggacgtctcggaaccgtccacgccgacgaccaccggacgtttgcccttggccgcggccagctcatcgtcatcatggtgaatcggcataccgggggcgagcgaatgcgcgatatcatcctgcacgctcttgtcctcgttgccggcgatcctgaccaccgtcaccggcaccttggcggattcggcgagggaggacgacagcgaccccacgaaccatctggtcacgcgacccagggatcggcggccgacgacgatctgttgggcattcgctccgatctgcagcagtccagtcgtgccggaggcgtgcacggaggtgagcttcaggttatccgggtcgaatgcgatgccggcgctcgcctcattcacccaatccagcagttgctcggtgatggccttgctcgccttctcccacgcgtcgggattgtccggctgggctcccatatcccacgaatgcgtccacgcatagaccgcgttgaccgccctgccgctcaaggacgcctccctgagcgcccactgcaaggccgtgaacgactcctcggagccgtccaccccaacgacgatgtcgccggctccgtccgacgtccgcggctcggactcgatgttcacatctggttgcgtcatgacatcctccttgttggcatgttatattcagcatatcgtttttcattgcgttatgagcgcaattatcgcgaggaaaggcataaacgtcatcgcgaatcggtagagtggtgtggactatcgagatggaaggacaagcatgttcgaacggtttaccgaccgtgcacggcgcgtgatcgtgttggcgcaggaagaggcgcgtactctccagcacaactacatcggcaccgaacacctgctgctcggcctgatccgcgaaggtgagggggtcgccgccaaggcgctcgcatccaagggagtgaccttggacgacacccgcaagcaggtcgaggagatgatcggcaaaggcaatgccgcccccaacgggcacattccctttactccgcacgccaagcaggtgttggagctgagtctgcgcgaggcgctgcagctcggtcacagctatatcggcaccgagcacatcctgctcggcctgatccgcgaaggcgagggcgtgggcacccaggtgctcatcaagatggatgtcgacctgggcgaactgcgttcggccactatcgacatgatccatggcaacagcggcggcgccaatgcctccggcaagggcgatctggccaacgccggcggcgtgcaggacaaacgcagccagaccggttcggccattctggaccagttcgggcgcaacctgaccgccgaagcggccgagggcaagctcgacccggtgatcgggcgcaccaacgagatcgaacgtgtcatggtcgtgctgtcgcgccgcacgaagaacaaccccgtgctgatcggcgagccgggcgtcggcaagaccgccgtcgtcgaaggcctcgcgcagaagatcaacgccggcgacgtgccggagacgctgaaggacaagcaggtctattcgctggatctgggctccatggtggccggctcgcgctaccgcggcgatttcgaggaacgcctcaagaaggtgctcaaggagatcaagacgcgcggcgacatcgtgctgttcatcgacgagattcacacgatcgtcggtgccggttcggcggacggcgccttgggcgcgtctgacatgctcaagcccatgctggctcgcggtgagctccagaccatcggcgccaccaccaccgacgagtaccgcaagtacatcgagaaggacgcggcgctggaacgtcgtttccagccgattcaggtgcatgagccgacaatcgcggagaccatcgaaatcctcaagggcctgcgctcgcgctacgagaaccaccaccacgtgaccatcaccgacggcgcgctgcagtccgccgcggagctgtcgtcccgctacatccaggaccgcaacctgcccgacaaggccatcgacctgatcgacgaggccggcgcgcggctgcgcatcaagcgcctgaccgccccgcccgagctcaaggagcttgaccagaaggtcgcgaaagtcgccgccgagaaggacaaggccatcaaggaccaggacttcgagaaggccgccgagctgcgcgacaaccaggagaagctggaagcggagcgcaaggagaaggaatcctcctggcgcgagggcgagtccgatgtcgagatggtcgtgaacgaggatgtgatcgcccaggtgatctcctcgaccaccggcattccggtgttcaagctcacccaggccgagtcgaagaagctgctcggcatggagtccgagctgcacaagcgcatcatcggccaggacgaagcggtttccgcgctgtcccgttcgattcgccgcactcgtgtgggcctcaaggatccgaagcgtcctgcgggctcgttcatcttcgccggcccgaccggcgtcggcaagaccgagctggccaaggcgctggccgagttcctgttcgacgatgaggacgcgctgattcgcgtggacatgtcggagttctccgagaagtatgcggcatcgcgtctgttcggtgctcctccgggatacgtcggttacgaggagggtggcgagctcaccgagaaggtgcgccgcaagccgttctccgtcgtgctgttcgacgagatcgagaaggcccatccggacatcttcaacacgctgctgcaggtgctggacgacggtcacctgaccgatggtcagggacgcaaggtggacttcaagaacaccatcatcatcctgaccaccaacctgggtacgcgcgacatcgccaaggccgccaacaccggcttcaaccttggctcgaacgcggagtccagctaccagcgcatgaaggatcaggtcagctccgaactcaagcagcagttccgccccgagttcctgaaccgtcttgacgacatcatcgtgttccgtcagctcaccgagccgcaggtgcgtcagattgtcgacctcgacatcaagcagctcaacgaccgtctgttcgaccgtcacatgtcgctggagctcaccccggccgccaaggacctgctcgcgcagaagggcttcgacccgctgctcggtgctcgtccgctgcgccgcgtgatccagcgcgacatcgaggacgccatctcggagaagatcctgatgggcgaactcgaggacggtcagcgcgtggtggtcgactccgaaggcgagggcatcctcggcgagttcaccttccgcggcgaacagttcgacgacgccaagcccgagaacgagccggctgcggagccggcaacggaggagtcagctgacaagtcggctgacaacgccgctcccgcctcgcaggaggcctgatcgggtaccggttgaccaccgactgaccacccccagtctcgctacactcgacagccccgccagcgggggcgtgaattggctcccgctggcggggctgtcgcgaagcgactgggggtggtctgcaatatcctcccactcatgccgtcctcaggacggcaaatcacccgcgctcatactcccaccatgcgattccgtcctacagtggaaaccgacacaacgaagtgttggtcagaaagtatctggccgcgatcattactgtggtctgtgctatgacatgtgcgacaccaattgcacacgcagacggaacctctcccgaaaacgagttgttcaccgtcgtgttggtacaggacgatgagaggatggtcagctccaacattcccgcacagtatgtgcaggagtataagaacaggctcaagaacgaaaaattcaaggccgccgagattgccaaggcgaccggttccgagataagtctcatgaccacgacagctaacaacccgctgaagccaaccgtgacatatttccggaaaagcagctgcttcatgcaattcatatgaccggtggtttgtcatacctgaatgtaacgaacggcctattcatgattgctgtcatcgtattcgccggtctgcttggcctgttgctcagtatgatgatacgtcggcagcagacccgtgagcaggcgcatgagcgcatgctggagcgggagcgtcaggaacatcacgctcagacgctcgactacgccgcgcaggtgcacgactcgggcggacgcggtatccgttgatcggttgcgtcgactatgtgacgctcttcgagaagagcttgccggcaagggattccatggagggttcgcgctgcacgacaatggactcatggaagacatcgaccccgatcatatgacgctgcttggcgagctgctcaatgaaatcgcccataacatcatccggcattgcccggcaggttgcgaattcgattgcagcgtgatgcttcacgatgacgtcgcagaagtcacccagtacaattccgtgactcatccggccgataaaagtgagacggcggtctccacacatatgggacttggcctgtgtcgtgacagactgctccatatcggcggcatgctgcgcaccgaggtcgaggacggcacttggatgctgtatgcccgtgtgcctctatcgcatcaaacctgaccactgtcgtagcgtccgcggtgtcgtaatacaaaaaagagcgccggggagaattccctgacgcccatgccaacgagacgatgacagccggtaatcggtgtgtcggccgaccgtcctgacgacggcggccggccgacacaccgggccggacagcgaatcggcctacttgatagcgttgagccactgctccttggtggccttctccgcctccagcttggccttcttctttgggtcggactcggtcgcgatcttctcgtcaagctcggcgagctgagcggtcagctgctcctcgaagctggacttgcgggcgtcggcctctggatcggtcctcttccacgcggcgtcctcgacggccttgatctgcttgtcgacggcgtcgagacggccttcgatgcggcgcatgtcgtcgcgcggcacatagccgatctgatcccactcgtcttggatggctcccagcgcctgacgcgccttcttcgcggcggcctcgtcggcgacgggtaccagggcctcggccttcttcagcagctcctccttcttggcgaggttctctttctcggaggtgctgatctggtcacggtcggcctgacgcgcgttgaagaactcgtcggctgccttgcggaactgcgcccacagcgcgtcgtcatcgctgcggccgacgcggccggcccgcttccaacggtccatcaactcgttgaaccggcgcgaggtctcgccccatgcggtcgagtccttcagctggttcgcctcggcgatgatcgcctctttctcggccttggcatgggcgcgctcgacgtcgcgggcctgcgaccacttgcggcgggcctggttgaacgtggtgcgtgcggcggagaaacgcttccacagcgcgtcggcctgcggcttgtcgatgtgcacggacgtgcgctgatgctgctgccactggtcgaacaaggaacggaacttgtcggcggtggaacgccagttgatctcgtcatccagcgaggatgcgagggcctcggccttctcgacgatcttggtgcgttcttcgacagccttggcgatcgccgccttgcgggccttggtgagctcggccttcttcgcggcgccggcctccttcagctgctcgaactgctgcttcagcgcggccatgtcgccgaccgccgcgggcttgtcggtctcctgctcaagggacttcagcgtctcgtcgatctcgtgcgacttcaccgtgtcggaatgcaggcggctcgccagcagatccaacttggccttgaggtcaaggtaacgacgggcgtacagcgacagcgcctcctccttggagacgtcggggaactgcccgacctcacgctcggagtcgccctccctgacgtacacggtaccgttgtcgtcgacgcggccgaacgcttcggccgccttcacctcggcgtccgaatagctggatgccgaagcggcgggggcggggcgcttgaccgctttcttggcgaatgcggccggcgaaggggcgtggggtttcggcgcggatgcaggggtcggtgccggtgtgggcgtcgttgcctgctcggtgggttcggtggtgttgtcggatatggtggcagtctcgtcggccatggccagctccttataagcttgaaggtagtcgttggctggggaaaaatccgaatggatttttccgcaacctcccctattatagggaatcgtggctaaaggcgcatcaatatcaggatttccagagtggctcccctctgaacgtgttgtggagcagcgtgtcatcgacacgctccgtagggttttcgagctcaacggtttcatcggcatcgagacacgcgcggtggaacagggctccagtctgctcaaaaaaggcgagaccagcaaggagatttacctgctgtcccgtctgcaggaggtcgggcacgaatccgacacgccggtcaatgaccggttgggtctgcacttcgatctgaccgtgccgctgagccggtatgtggtcgagcattccggcgacctcgcgttcccgttcaagcgttggcagattcagaaggtgtggcgtggcgaacgtccgcaggaaggacgtttccgcgagttcgtccaggccgatatcgacgtaatcggcaacggcgacctgcccgaccattacgaggtcgagctgccgctggtcatggtgtcggctcttgaggagctgcgcgcattcggcctacccaaggcgaccgtgcacgcgaacaaccgcaagctggccgaaggcttctaccgcggacttggcctgaccgacatcgagggagtgcttcgcgagatcgacaagctcgacaagatcggcgcggacgaagtggcgaagctgctcgtcgacacgtgcggcgccgatgaagcgcaggcccgcgcctgcctggaactggccgaactcaccgccgccgacggcaaggagctcgccgacaagttcgacgcgctgtgcgccgcgcacggcatcgcggccgattccgccgcgtacatgctggcccggcagggactggacacgctcgcgatgatcgtcgacgaagccgccctcatccgcccgggcgcggtgatcgccgacctgaagatcgcccgtggactcgactactacaccggttccgtatacgagaccttcctcgacggggcggcgtcgcttggctcgatctgctccggcggccgttacgacaacctcgcctcgcagggcaaccgcaagtacccgggcgtcggcctgtccatcggcctgagccgtctcgtgtcgtacatgctgcactccgccggagcgcacgccagccgcgtctgcccggcatccgtgctcgtcgccgtgtggaatgagcaggatcgctccgccgcgaatctcatcgcgaacacgctgcgctcccgcggcatcgccgcggacgtcgcgcccactgcggccaaacttggcaagcagatcaaatatgccgacaagcttggcatcccgtatgtgtggttcccggccggcgcgacggacggcgacgacacggcatccgacgaggtcaagaacatcgtcaccggcgatcagcagccggccgatcccaagtcgtggcaaccggatactgtgtatgcccggcaaaccgttgtaatcgactgattttcgtcagcgcccgtcctctgccggggacgggcgcgcgttgcagggaaaccattgcatagattgcataagaaagaggaagcatgagccagacggcttacagaacacatcatgccaccgaggtgaccgaagcactcgtcggtcagaaggtgacgctcgcaggttgggtcgatcgtcgccgcgatcacggcggcgtggcgttcatcgatttgcgcgacaacaccggcctggtgcagatcgtcatctacgacgaggagatggcgcgcccgctgcgctccgagttcgtcatccaggtcaccggcgaggttcgtctgcgcccggacggcaacgagaacacgcatctggccaccggcaagatcgaagtcgtcgtcgagaccatcgatgtgctcgccaagtccgatgcgctgccgttccaggtgtccaccgcgctcgaaaacgagtccgagaacaagcttcccggcgaagacgtgcgactgaagtaccgttacctcgaccttcgccgtccgtccatgcagcacaacctcaagctgcgctccgacatggccaaggccgcccgacacgcgctggaggagatggacttcaccgaggtcgagaccccgaccttcatcaagtccaccccggaaggtgcccgcgacttcgtcgtgcccgcccgtctggtgcctggctcctggtacgcgctaccgcagtccccgcagctcttgaagcagctgctcatggtctccggcgtcgagcgctactaccagctcgcccgctgctaccgtgacgaagacttccgcgccgaccgccagcccgagttcacccagctcgacatggagatggcgttcgtcgatcaggaggacgtgatggccatggccgagaaggtcatcgccgccatctggaagtccgccggctacgacgtgcagctgccgattcagcgcatcacctggcaggatgccatggacaagtacggctccgacaagccggacctgcgtttcggcaacccgctcgtcgagctcaccgaatacttcaaggacacgccgttccgcgtgttccaggccgactacgtcggcgccgtcgtcttcaagggcggtgccgccaccccgcgtcgtcagttcgacgcatggcaggagtgggccaagcagcgcggcgccaagggcctcgcctacgtgtccttcaccgaggacggcgagctcaagggacccgtcgccaagaacctgtccgactccgagcgcgagggcctgatggccgccgtcggtgccgagtccggcgacgccgtgttcttcgccgccggctcccgcgaatcctcccagctgctgctgggtgccgtgcgcgtggagctcgcccgtcgcgagggcctgctcgatccgaagaagttcgccttcacctgggtcgtggacttcccgctgttcaagcccaccgacgacccggatgacgatgatgtggccgtcggccactccaagtggacctccatgcaccacccgttcaccatgccgagcaaggactggatcgacaagttcgatcaggatcccgagcacgccatgtctgactcctacgacatcgtctgcaacggcgaggagatgggcggcggttccgtgcgtatccaccgcgacgacattcaggaccgcgtcctcaacgtcctcggcatcgctcccgaagaggccaaggagaagttcggcttcctcctcgacgccttcaagttcggcgccccgcctcacgcgggcatcgccctgggctgggaccgcaccgtgtccatcctcgccggtgccgacaccattcgcgacgtcatcgccttcccgaaggccggtggcggtcgtgacccgctgaccggcgccccggctccgatcagtgacgagcagcgtgccgagaccggcgtcgattacgacccggatgccgaagactgagtaacatctcgctgtcttctttgacgagagggcccagaccatgcaggtcggggccctctttgcatatccgtctgcgcagtgcacaggccgttttttcgcagttgtccgcaccctgctacccgtgatgattgccgaactgctgttttgcgttcctaagtgcgcgccgaaacgacaagtgcgcgcacatagcgacgcaaatggcccggtttgcgttcttaagtgcgcgcggtcgtcgtttcggcgcgcacttaggaacgcaatgacggccaaagcacatcagatgcatgccatatcgaccatctgatgatgggcgatgaggtcgggcagggcacaatgggatcgtgatcaccattggaatcgtggataacgaccggttcgcattgcccatgctggatatgccgctgaccgacattcccggtcccgagatctgccggcgtgttcgtgctgcatcagccgacatcgtggtacttggcatcacatcgtattcgttggatcattaccgtcagctggcgatcgatgcgggcgcccaggggttgattgccaaaagcgtgacgccgaaggaactcgccgaagccatgcggaatgtcctagtacggccgttcccgggtttcccgaccacggaacaggcacatgggtcgatagtatcggcatcggcgcgacggccccggacactgtcgaagcgggagcgtgaggtgttgggtctgtatgccgacaactattcgacggcgtagattgcggagcgcctgggaatagcggattcgacggtgtccgtggtggtgcggcacgcgaaggtcaagctcgacgtcgccgctcggtcggaggccgtgcgcgtgtttcgtgcattgtactgagtcgaatacggcttgaacatcgtgcgtctgtttacggtgaccacccccagccgccggtaccgatcgaagccgctgccatgtcgatccggcatgttgatgacgtcatgcgtgtcatgcagcgcccgcatgacgatggagcgcagcgattgtgcttccgcttcctccagcagccctgcgtcgaggtcatgatcgatacgcatgaccgcgtaggcgagatcgttggagattcggtcgtgcacacgcacaagacccgcaaggcaccgcccgaattcgccgcggctttcgtcaccgcggacacgcacgccgacctcaacggcgtggtcaagcacacgctggaggtgtccaaggtcagtttcgtgccgattgacgcggccgtcgaggcgaccggcatggagtcgggcggcatgtcgccgatcggactgcccgatgactggccgctgctcgtcgaccagcatgtgctgtcgattcccaagctgtatctcggctccggcatccgcccgtccaaactggtggtcgacggctcgatcttcgctgatattcccggtgtccgattcgtccccggtctgggcaagccccggcagtaagacgccgtgcggccgcgggcgagtcgcacaggcgagtcgcatgttggacgagaatgtgagcttcttgtgccttcaatagtttatactgctcaatatgtcagaaaaacaagaagcaatactccccgtggtgccgctggtaccgggcaatgaacccacaggacgacctctcgtcgaactgactcacgtggaaaagtacttcggcgacctccacgtattgaaagacatcaacctgaccgtcaacaagggcgaagtgctcgtcgtcgtggggccgtccggctccggaaagtcgacgatgtgccgcaccatcaaccgcctggagaccatcgagtcgggcgacatccgcatcgacggcaaggcgctgccccaggagggcagacagctcgcgcagctgcgcgccgaagtcggcatggtgttccagtcgttcaacctgttcgccaacaagacgatccttgaaaacgttaccctcgcgcccatcaaggtgcgccacatggacaagaaggaagccgagcgtctcgccatggatctgctgacccgtgtcggcgtcgactcgcaggcgtccaagatgccctcccagctgtccggcggccagcagcagcgcgtggccatcgcccgcgcgctcgccatgcgcccgaaggtcatgctgttcgacgagccgacctccgcgctcgaccccgaaatggtcaacgaggtgctggacgtgatggtcgagctcgcgcgagaaggcatgacgatgatctgcgtcacccacgagatgggcttcgcgcgcaaggcggccgaccgcatcgtgttcatggccgacgggcagatccttgaggagaacacgcccgacgagttcttcggccatccgaagaccgaacgcgccaaggacttcctgtcgaagatcctcacgcactgattggtcgtgacgcatatgacggtattcaacactcgcatcaggcgcatcgcccgccgcgcgctcgcggcgctcgccgccgtggcatgcgcgatgtcgctggccgcgtgcggcgccgacgaaagcggcaagatacgcatcggcatcaagttcgaccagcccggcctcggcttcaagaaatccggaacatacgtcggcttcgacgtggacgtggccaagtacgtcgccaagaagctcggctattccgaagacgagatcgtctggaaggaagccccctccaagcagcgtgaggccatgctgcagaacggcgacgtcgacatgatcctcgccacctactcgatcaccgacgagcgcaagaacgcggtctccttcgccggcccgtacttcgtggccgggcaggacctgctcgtgcgcaaggacgaccattccatcaacggccccgaagacctcaacggcaagcgcctgtgctcggtcaccggttccacttcggccgccacagtcaaggagaaattcgcctccgaagtgcagctcatggagcagcccggctatgcggaatgcgccacggcgctgttctccggcatcgtggacgcggtcaccaccgacgacatcatcctcgccggcctcgcctccgcctcgcgcggcaagctgcgcgtcgtcggccagccgttcacgcaggaatactacggcgtgggcatcaagaagggcgacacggcgctcgccaagaagatcaacgccgccatcgccgagatgatcaaggacggttcctgggagcgcgccatcgccgacaacaccgagggcacgtcgtacacgccgaacgcggagtacaacccgccgaaaccgaccgagggggagaagtagcatggacggattcatccaactgttcagcgagtacgacgttcccgccgcgttcctggtcaacatcgaactgacgctgtggtcggcgctgttctcgctgattctcggcgtggtgctggtcatgatgcgcatctcgccgatatcctcgctgcgcaccgtcgccggagcctacgtggaactgttcaagaacctgccgctgaccatcatcatggtgttcatggtgctgggcgcctacgcgcagctcaagctcacgttctccgacacgttcgtcacgaacttcttctggctggcggtgacgggcctgagcctgtacaccgcggcgttcgtgtgcgagtcgctgcgttcaggcatcaacaccgtgccgatcggccaggccgaggcggctcgtgcgctcggattgggcttcatgcagtcggccacgcagatcatcctgccgcaggcgttccgcggctcggtcgcgcctctcggcaatacgctgatcgcgttgctgaagaactccacggtggccgcggccgcgtcggtggccacggagacgtcgtcgctgatgagcacgatgatcgaattccacccggacgtgatcgtgcagatcttcctgatcttcgcgttcggctatgtgattctcatcatcccgatcggcatgctgaccacgtacctgtccaacaagctcgccgtgcggaggtgacgacatggctgatacttccaattccgtattgttcgaccagcccggtcccaagggacgtcgcaccatccgcatcgtcaactgggtcgccgcgctgatctttgtcggcgtgctggtgctgatcctgatgcgcctgcacaacccgccggacggcgagaaccagctgagctgggagctgtggaagcccgcgctggagcgtgaggcgtggactgatttctatcttcccggcctgtggatgacggtcaaggcgtccatcgtcgccgttgtcggctccgtggtgttcggcctggtgttcggcgtcggccgactgctgccgaacgtggtgctgcgggcgatctcgtcggtcgtcgtggagttctgccgcgcggtgccggtactgctgctgatgatcttcttctggcgctggttcgcgttcgcgggactgtccagcccgtcctactgggcagtggtgctggccctggtgctgtataacggctccgtggtcgccgagctggtgcgttccggcgtcggcaacctaccgaacgggcagcgtgaggcgtcgctcgcactgggactgaccgagacgcagtcgctgatgcagatcgaggtgccgcaggccgtctacgcgatgttgccggccgccgtcacgcagctggtcgtggtgctcaaggataccgcgcttggatcgatcatcatgtacactgatctgctgcaggagtcgcgccgtctcggctcgatgtacttcaacatcctgcagacgctggtcgtggccgcggtcgtgtacttcatcgtctgctggctgctgtcgcgtctggccgaatggctgccgtcgcgcatgcagcagcgcaccgcggcgccggccgaaccggaaccagttccgccgatcgcgatcatggatccgtccaacgtcaaccagatcgccgtcgccaaggaggtcgaggagcgccccctgcgcggcacgccgctcacataccacgcgcaccatcgcggcagcaacgcctcgatccacaactggcagcgcacgcgctacgagcagggcttcgacgaggcccatcccgatccgcagggcggagatgagggcgatgccgagcagaagaacgctgaagacgacgcgtaatgacccggtagattacggtccgcgcaggaatacgcggacagcgtcccacagcctgacccgataacggccgggccggcactccccgacaggggatgcgccggtccggccgttcgatattccgccgcggaaatgcttcacaaggcggcgcatgggacgtacaatcggggcatggccaaaggcgacggaaaatcggacaagacagataagccggacaagtcgggcaaaggagcgaagtccgagaagacggacaaacgcatcgacaaggtactgcggctcgccacgaaccgcatcgaaaccatcgaatcgagcacgacggtggctgaacgactcgcgaacgccgccaaatccagtgagctgctcagcgctgtatggtcgctgccacccgcgcagcgtctcatgttccatcacggcgtgcatatcgacgatgtcgccggagactccacacccggcttcccaggtggcagggatgacgctgaacggttcatcacgctcagctcatcggagatcgcccgatatcaacggctgctgtatgcgaacggcgtcaagggctcgcgccgccggctgctcatcgtgctgcagggcatggacgcctccggcaagggcggcatcgtgcgccacgtgttccggcagggcgacccgatgggcatccactatcacggtttcggcaagccgaccgacgaggagacgcggcacggcttcctgtggcgggtggaacgcgagctgccaaagaacgggtggatcgcggtgttcgaccgctcgcattacgaggacatcgtcatgccgcatgtgtacggcacgtatcccgaggccgaatggcgcggccggtacgatctggtcaatgagttcgagcgttcgctggcggccgacggctgcgcgattctcaagatcttcctcgtcgtgagccaggaggagcagaagaggcattttctcgggcgtctcaacgacccgaccaaatactggaagttcgacatgtccgacctggacgcgcgcgaacgctgggacgactatatgggcgcgtggcaggaggtgttcgagaagaccagcacgcagactgcgccgtggtatctggtgcccgccgacaaccgctggtactcgagggccgtggtctccgagctgctgcgcaccacattgaagaacatgaacatgacatggccgggactcgacccggacgtcgatccggacgaggttcggcggctgctggggtgaacttgcgcccgccggtcgattccgcgagctgcgccggcgtgtagactgggaaccactatggcagatacagaacattatggttcgctgggggcgctggcgcccgcgtgggacgagggcgagcgcaacatcgacacggacgagatctacgagcggttcttcggctgggtggccgacgtcaagggtgtcgagccgtggcctcatcaggaagaggccatcatggacctgctggcaggcgaccatgtgatcctcaacacgccgaccggctccggcaagtcgctggtggcgcttggcatgcacttcgccgcgctgtgcaccgggcggcgctcctattacaccgcgccgatcaaggcgctggtctcggagaagttcttcgatctggtcgaggtgttcggccgcgacaacgtcggcatgctcaccggagacacgcatatcaacgccgatgcgccgatcatctgctgcacggccgagatcctcgccaaccaggcgctgcgcgaggggcgtcgcgcggacgtcggctgcgtggccatggacgagttccactattacggcgactcggagcgcggctgggcgtggcaggtgccgctgctgacgctgccggacacgcagttcctgctgatgagcgccacactcggcaacgtcgacgcgatcgccgacaagctggaagacatgaccgacactgacgtggacgtgatcgccgacgcgccgcgcccggtgccgctcacttacgagtacacgctcgatccgctggagaagaccgtcgaactggcgttccgcaagggcgagacgccgatctacgtcgtgcatttctcgcaggatgcggcgctcgacaccgcgcagtcgctcgcctcgaccggcgtgtccagcaaggagcagcgacaggccatcgccgaggccatcaagggtgtgaagttcacgaccgcgttcggcaagatactgcaacggctgttgcgtaccggcgtcggcatccaccatgccggcatgctgccgcgatatcgtcgtctcgtcgagcagcttgcgcagcaggggctgttgccggtcatctgcggcaccgatacgctgggagtcggcatcaacgtgccgatccattcggtcgtgctgaccgcgctgacgaagttcgacggcaccaagatgcgtcgcctgcgcgcccgcgagttccatcagatcgccggccgcgccggccgcatgggcttcgacacggagggactggtcgtcgccgaggcgcccgaatacgagatcgaaaacgccaaggccgtcgccaaggccgggaacgatccgaagaaactcaagaaagtcaagcgcaagaaggcgccggaagggttcgtcacgtggaaccagagcacgttcgacaagttgattgacgccgcgccggaaacactcgtcccgcacatgaagatcactcattcgatggtgctcaacgaggtcacgcagggcggtgacgcgcgccggcgcgtcgacgagctgatcgacgactccgcgcagacgccggaccagaaggagcatctgcatgaacgtgccgacgagatattccagaccctgttcgacacgaaggtgatcgagaccgaagagcgcgacgacggtgggcttgactacttcctcgacgtggacatgcccgacgatttcgcgctcgaccagccgctcagcccgttcctgctcgccgcgctggaactgctcgaccctgaatccgacatgtacgcgcttgacgtgatttccatggtcgaggccacactcgaagaccccaagcaggtgctgcgcgcgcaggagcggcaggcgcgcgacgccgcgatgatccggatgaaggaagacgggctcgaatacgacgagcgcatggacaggctgcaggagatcacctatcccaagccgctggaggacatgcttgacgcggcgttcgatcagtaccggcacgacgtgccgtgggcgaacgactactggctgagccccaaatccgtggtacgcgacatggtcgagaccgcctccgacttcaccggatacatctcgcggtacaacatcgcccgctcggagggcacgctgttgcgctacctgtccgacgcctaccgggcgctcgcccgcaccgtaccggacgacaagctcgacgatcagctgcgcgacgtgatctcatggctgcgcgtggtcgtgcgttcgatcgactccagtctggtggatgaatgggagaacgccggcgcgtccgatgatgcctcgcaggcggccgccagtctggccgcgccgggcgcgaaggccgcggtggtggaggaccggcgcgggctcaccgtgctgatccgcaacgcgctgttccaccgcgtgcagctcatggaccttgacaagcccgaggcgctcggcgctctcgacaaggagtggggctacggcgtgcatgagtgggaggacgcgctcgacgacttctacgacgaacacgagtacgtgaacaccgacgccgaggcgcgttcggccgagctgttcatgctcgacgagaagcacgagaacgatgagcacagctggcacgtgcgccagatcatcgacgactccgacggcgaccacgactgggccatcaccggcatcatcgacctggacgcgacgcaatccagcggcgaagtcgtcttcttcgactacgccgtcaccaacgactgacgccgccagcacccgccagcgggggctggcgcgaagcgactgggggtggtccgtccggtatcgaacctatgttcgatgccgtgttgtagagtgtaggcatgactgagaatgatctgttcggggcggcggatgtgcccgacgatatgacgcgaccgttggccgtgcgcatgcggcctcggacgatcgacgaggtgttggggcagtcccatgtgctggggaagggctccccattgcggcgtctggcgaatccctcgtccaaggggtcgctgaccgcgccgagctccatcatcatgttcggacctcccggcgtgggcaagaccacgctggcgaccatcgtcgcccgtcagtcggggcgcgcgttcgaggagctgtcggcggtgacatcgggggtgaaggacgtgcgtgacgtgctcgcccgcgcgcggcgcagactcgtcggcgacggcacggagacagtcctgttcatcgacgaggtgcatcgtttctccaaatcgcagcaggacgcgctgctgcccgccgtcgagaaccgtgacgtcaccttcatcggcgcgaccaccgagaatccgagcttctccgtcatcaaaccattgctgtcacgttccgtcgtcgtcaaactcgaatcgttggaaccgtccgatctcgccacgctcatcgcacgcgcggtggaagacaagcgcggattgaacggcgaagtcaaaatcgacgatgcggcggtcaacgagatcatccgcatggccggcggtgacgcccgcaagacgctgacgatcctcgaagccgctgcaggtgccgtcaccggagacaaggcccgcaaaaaaggcgcgcggcgcccgaccatcacgccggatgtggtctcgcaggtcatggacgccgccaccgtgcgctacgacaaggacggcgacgaccattacgacgtcatctccgcattcatcaaatcgatgcgcggctccgacccggatgccgcgatacactacctcgcacgcatgctgcgagcgggcgaggatccgcggttcatcgcccgtcgcatcatgatcgccgccagcgaggaggtcggcatggccgcgccgcagatactgcaggtcaccgtcgccgccgcacaggccgtcgcgatgatcggcatgcccgaagcgcgcatcatcctcgccgaggcgaccatcgccgtcgccaccgcacccaaatcgaacgccagctacaacgccatcaaccaggcgctcgccgacgtggacgccgggctcatcggccaggtgccgctatacctgcgcaacgcgccgaccgcgttgatgaaaagctggggcaaccatgacggctatcggtacgcgcacgactggccgggtgccgtcgcgccgcaggaatacctgcccgaggagctgcgcggccgcgagtactatcatcccaacgaccgcggatacgagcacgaggtcagccagcgtttggacaaagtccgctccatcctgcacagtgaaaccgcgccggacggctataccgagtccaaagagcagaacggataaatcgccccgcccgacggggttgccgagcggtagcgaggctgggagtagttcatcgcaactgccactccgccctcgtccggcaatccgttacactgtaatgtggcctgacgcagtgtgggtatcgtaagggcagtccggaaacaactggcgtcggtctgaatggatttcatcacatgacctcaacctcgcaggagcgcatccccaagcgtctgatcggcgccatcgtcgccgtgggctcgctggcattcatcggcatcctcaccgaaacggtgatgaccgtgctgttcccggaactcatgaccgaattcggcgtgaacaccgccaccgtgcaatggatcaccaccgtgtatctgctggtggtcgcggccacgatgccgctgtcgtcgttcctgaaccgccgcttccggctgaagtccctgttcatcgcggctgtggtcctcgccgtgaccggttcggcgatcatgatcgtcggccacaccttcccggtcatcctgctcgcccgcgtgatccaaggcatcggctcgggcgtggcgacgccgctgatgatgaacatcatcctcgaacagtcaccccgcagcaaggtcggccgcctcatgggcgtaggttcgctggtgatcacggtcgccccggccatcggccccaccgtcggcggcgcagtgtcgagtgttttgccgtggcgtgccatcttcgtcatcgccattccgatcgtgctgttggtctccctgccgctcggactgcactgcatcgagcagaaacgccccaccgaggacgcgcggctcaacccagtgcagttcgtggcgatagtgctcgccctgagcggcatgatcttggcgctcaaccagatgggcgtcgcggtcagcgctgcggtcaacggctcttcggcgacacgtcccgtcatcatcaccgtcgtgagcctggtcgtcggtgtgggctccctggtgttcttcggctggtcatccagccgctcgttctcgccgctgattcgtctgggatggctacgagaccgtgtcgtccagcttcatctactcgcgtacctgattctgccgatcgtcggcatcggattcggatacgtcatcaccaatctggcccagatgtcgcttggcaccagcgcgttccacgccggcgtcctcgtgctgccgggcgctctggtcggtgcgttcttcgcgcccgtcggaggcatgctgtacgacaaattcggcccgacgaagccgattctttcggcgatttcggtggccacgttcggaccgatcctgctgctggcattctccatgcggttgacgcctgcgctgctcgccggcttctacttcattttcgggctgtgctatgcgctgggattctccaacatcatgaccagtgcgctgagcggcatcgaccacgcgttcatgccggatggcaatgccgtgttcaataccgcattgcagttcggcggtgccgtcggcaccgcactgttctcgatgattctcggcgtgtctcaggcgggcgccggctcggccgaaaaggggagtgccgcgttccgtcacgccacggccgtgggcggcacgtggatgttcgcgacgatgacggcgatctgcctgatcgcgatctgctcgcttgcctgcgcgttccgtatccgtgcgtcgagaacggctgccgagcgctgactcccgctccggggatggttcaggtcagagccatcccaccgccagcagcgcgacgacgtaggcgacgcacgcggctgcgaccattagatcgcgtcggcgcgcgcgcattactctccaatgggtgcggtggatgccttcctcgtagcagcgcgcgttaagcgccagactgagattatccgcgtgacgcagcgccgccacaaggatcggcacgatgatggcgaacagcgctttgacacgagtggccggcgaaccggtctcgatcgtgccgccgcgggccgattgcgcgtcgatgatcgccttggtctcgtcgctgagcgtcggcaggaaccgcagcgcaagactcatcaccagagccacttcctgcgtgtgccagccgagctttctgaacggcaacagcagggagccgaacgcatccgtcatcgcggtgggggtcgtcgtcgcaaggaacacggcacccaggatgatcaccagcgcgagacggcacgaatacagcaccgcgaccatgagcccgccggtggtgatcggcagcgggccgatatgcgcaagcgtctcgccggagcgggcgaagaacatgttcaccaggcccatcaccacgaatacgatcaggaacacgcgcacggaagacagcaaacgcagcggatgcagccgggcggccgccacgacgcatgcggtcaggacggcgcccatcgccagctgcgccggcctggtgatgacgaatgcggtgaacatcaacatcaggaacgtcaccatcttcacgcgcggatccagggacgctacgaatgacggacggttcctggatccgtcttcaatggactcgatgccggctttgctggcgttcgtggaagactcggtggcgtcgccgacgctggtgtctccgtcgtctccggtgccgcaaccatcgccttcgccgtcgcctttatgcgatcccatggtgatgatgcggtccgcgcagtgctcggcctcgtcgatggaatgcgtgatgatgagcaccgccacgccctgacttttcagggaacccagcagcgcgtggatgcgggagaccgccgattcgtccagactggcggtcggctcgtccatgatgagcacacgagggcggcatgcgatgacgcccgcgatggcgacgagccgctgctgcccgcccgacaggttgaacggagaacggtcggcgagatgctcgatatgcagcatccgcagcgcctcctctacgcgggtggccacctccaactcgctcagatgctggttgcgtgggccgtacgccacatcctcggcgacggtgtcagcgaacagctgacgctccggatgctgcatgacatagccgacgttgcgccgtagggccgcgcgttcttttcgggtgagtgcgcgaggccgtttcccgtgtttcgacgacgcgaccggcaatccggccacggtgatcgatccggcggacgggcggtccaaggcgcacagcagacgtgcgagcgtggtcttgccggcgccgttggaacccatcagcgccacgatttcgccttcggagacgcgcagagaaagattctcgaaaaccggggcatcgccatcgtcataacgatatgacaggccggatactgcgatggcgtcggatgctgagcctgtaggtggaatggatgatgcgtccgacttggtagacgccggttttacgggttgtccggatttcgttggttgcgcgggcgacgcggccgcggtggaacctccgggctcctcagctgccgactccgtggagcccgcagcgtcagttgcgtcagcgtggctccgcgcaatcacttgcttcgccgcaatcgcgtccctgtcggcttcgacctgcgtgagcagcccgccgtctatgcgaagtacgcggtcggcgtgcatggtctcgtcatgatgatgcgtgaccagcacgatcgtcgtgccacgccgttgcagcatgtcgaggatgcgcatcacctcgatccgcgcgtcgggatccagcatcgcggtcggttcgtcgagcaccagcatgcgcgggtccatcgccagcattccggcgatggcgatacgctgctgctggccgccgctcatgcgcgtcggatccgcgtggcgaaaccccgccatatccaccgattgcagggattcgtcgatgcgcccgccgatgtcgtcccgagccacgccgaggttttccgggccgaatgccacatcatcctcgacgatggtggtgacgatctgatcctccggattctggaacaccgtgccgatgccatgccgggcattgcggtattcgctcggattcgctgaagcggtctcgccgtcgaagacatgatggcccagcagcgtcacatcgccgccgtccggggctgcgagaccggcgatcagacgcgccagagtggatttgccggagccgttggggcccaccagacacagccgctccccgctgcggatggtcaggtcgatgccgtcaagcacccatgtgacgccgttgtcatagctgaatcgcacatgctcaagtcgtgcggcgggaaccatgccgttcatatcatccattcacaaaacatcgtggtcaatccatatcatagaggccattgtcaccgctgacggatgcagcccgccagagaggtcatcacccggactgtcggaaaaaagcctcgtgcgatgacccttttggcgggctgccctaggcggcgacttcgcgccgcgtcatgtcagcgattcagcaagttcgaaatcggcttgtacaccaggaacgtgaccacgccgtgaatcacgaacttgatcaggttgaacggcagcagcgcgggaacgatgatggccgccacctcggagaccggccagccggtgtagatcggcgtgatgaccagattgccggcgatggccgcgaccaaggccagcagggcaccgacgaccaaaccgatgacagcgcccttgcgcgtgtgcacgtggcgatagatgagcgccgccggcaccgacagcgacaaggccaccagcacggccatcagcgtgccccacgggtccatgaacacgtgcggtacgaagccgagcacactgacgatcgcggctgcggccgggccgtacgcgaagccggcgatcaggcacacgatgccggacggatcgtatttgaggaacgagaacgccgggttcggcaggatcgggaacgagatgaagctggtcgccatcgccagcgccacgaacagcgcgtacatggcgatgcggcgggtcgaccagcggccggaatcggcgacgccggtcgaatgcgccaaatccgggcgcgtcggcttggccgcgttcgacgaatcggctgaattgggttgcgaagatacactcatggtgagctccgtttcttccatccggactttgaccgttggctccggattcccaccggatcagccgcttgcgcgggtcgcgggctgccgcggccgccgttatgaatcccggctccgcaggtcaccgccagtaaggaattgcaccttccctgaaacttgcttaaccatgtatacgccggggtgtggatgattgacgtaacgttgcccacatagcgaacatgaggcatccatgcgcgtaggttgccccatccactacgttgtgccggttttcgcgctgcataccggcgcaattgcccatttcgacacgatttcgttatacaatttcgcgtacagccactatgacgtgcgtgtcgcacaccgtccaacaggaggtcatgatgattgataccgctcaagcgtttggcgtggatatcggcggatccggtatcaaggccgctccggtcgacctgaacaagggggagttcgccgagcccaggctgaagatcctcaccccgtccgagtccaccccgcaggcgatcggatcggtgctgcgcaagcagctcgaacatttcgagattccggagacggctccggtcggcatctctttccctgctccggtcaagcccggccagaagctgaattggatcgccaacctcgaccagtcgtgggtaggcgtcgacatcaccgaggcgctgtccgaggagtgcggccgtccggtcacggtcgtcaatgacgccgatgccgccggcttggcggaacagcagttcggcgcggccaagggtcaggagggtctggtcgtcgtgaccacgctcggtaccggcatcggcacggcgctgatctatgacggcgtgctcatcccgaacaccgagctcggccacatcgagctggagggcggcaagggcgacgccgagcgctacgcatcctccgcggtgcgcgagcgcaaggagctcagctacaagaagtgggccaagcgtctgaccaagtactacagcctgatcgaaaagtacttcagcccctcgctgatcgtcatcggtggtggcgtgagccgcaagagcgacaacttcgtgccgtttatcgacatcgatacgccgatcgtccccgcgaagctgcgcaacgaggccggcatcatcggtgccgcctactacgccagcaccaagtagcgcagagggcacaggcacatacattcgcacgccataccttggccgaccatcgtcccggcaatgcaggacgcatggtcgcggtagggtagtggcgtgcgtttttcttcccgagtagatctgagcgagcccaatcccatagccgcagccgagacacattgccggcgcgaaggcatgcccctgggcaagctcaacgattccaatcccacacgtcatggacttgcaccggcactggtgccgggcacgtacaccgccgacccgagaggcccgcggcccgcacgggaggcgctggcctccttcctgaccgagcttcaccggggcgccgaaggtgccggcaccgcgccggcggcggatccgaatcgcctctatctgctgagttccacgtcacaggcgtactcgtggctcatgaagctgctgtgtgacgcgggcgatgcggtgctcgcccccaagccggggtatccgctgatcgaatccatcgcccgcctggaatgcgtcgacactatcgaataccagctgcgtttcgacgggtcatggtacatcgacgtcgccgagttgcgcgcgctgctggacgggccgcagggggcgcgtatacgcgctttggtgctcatcaaccccaacaatccgaccggatcctacgtcaaggcgggggagcgcgagcagctcgtcggcctgtgccgcgagcgcggtgtcgccatcatcgccgacgaggtgttctacgattacgcgctggagccgttccccggcaatgcacggctcgccggcgaggcgggggcgctgacgttcgcgttggatgggttctcgaagatgctcgccgcgccccatgccaaggtcggctggattcaggtgtcggggcctgagacggacgtttgcgaggccatgcgtcggctggatgtcatcgccgacgactacctgccgatgagcgacatcatcgcctcccgcatcccggacctgttggaggcggcgaaggtccagaccgacctcgtgcgcggccgggtgcagggcaatctcagggcactgcaccgcatgctggagtccgacccgctcggcgtcgtctccgtgctgcgggccgagggcggctggaacgtgctgctgcgcgtgccgggcgtcatcgacgagaacgagctggtgctgcacatgattgacgcgcatggcgtctccggccagcccggctatttcttcgacatggcctcgaacggctatctggccatatcgctgctgcccgaaccggacgaattcgcgcataacgtgcgcgtcgtgctggactcggtagccgaattgctggggtgattgtcgaaggacgctctcaaaactcgcagatacagattccacgttttctgcgttttggccattttccgccgttttcgcgtaaaagcggaaaacgtatctgcgagttttgagagcgtgctttccgctatcgtgccgctttggaccgaatcaggtcctcatagaacgcggccgcggcggcaggttccccgtcgaataccaccgcgtggtcgtcgaccaccagcgcccggtcgatcgcgtactgcggccgtgtgatcatgtccacgtcatgcgtggcgaaaatgacctgcttgttgtagccgaacagcgccttcgccacgtgggccgagccgatctcgtccaggcccttggtgggctcgtccgccacgatcgccgcgggggagaagctcaacgcgctggcgatggcgagcaggtgccgctgctcgctgttgagcgagctggccgactgccgagccacggtgctgagcccgaaatgcgcgaacaggttgccgacgatggccagccgctctgattcgggcaccttgtgctttttcaacggctggtcgatcgcctcgcggatggtcgccgcacggtagtaactgtcggggatctcctcgcggcggacacgcccgacgatgtcctcgatgcgtttgagatcacgcttgacggcggggctgagcgcggtctcgcccgcggtgatggagacggatccgctcgtggcagccaatgctccgtcgagcagcttgagcagtgtggtcttgccggcgccgttcagcccgatgaccgccacgcgcctgtcgtcgggcgtgatcgtcagcgatgtgggcagaagcccgacggaaccgtcctcataggtgtgtccggcttggttcagcgtgaaggtcacctgcgatggcaaggcttcgtccttgccgaagagcgagtcaaaaagtcccatgactcctatagtagcggcattggcgcattcgcatcggcccgcatcgcgagaaggcccggcggccgccggtatgcggtcgtcgggccttctcgtcatgtcctgcgggcgatcgtcttcgcgtagccgaagtcgttgtcgaatatgtagatgtagtactggccgtcgggcagcagctggatggtgttgaagtggatccagtcccagcgcccggatgcggtcggatcggattcatcggtgccggagtggccggtggaagccttgtaatcggggaacatctcgccgaagtcgacgagcttcgtcaccttgccggtgctcgtgttgaccttgatggcctggtcctgcacggcatggtcggatcgtgtcaggtcggtggcgagggagacgatgttgccgtcatcgtcgagcgcgtagtcgtggtggaggatgaaccggtcacccaggtcgatgatcttctccagctttccgaaccggttcatgccgacgaaatgcttggtcgacgcggagaaccacatgagcccgttgtcgtcgaacagcagccgttgcgagcggtagcacggtaataatgcgcagaggaaacgctatgtgttgtctggcgatttcctgaatcgcatgaatgtcgattatgacgggcggcttatacgtgtcgcggtccggtgccgtccgcgacacgcccgcgggcgtctacagcctgaaccaggcgacgaccgtgtcgtagaggaccggattgttgttgatcagcgagtcgtcgcggcccgggatgaagcaggccagcacagccaggatgatggatgccatcagcaccgccacaaccagtccgcggacgcatgcgagcgccatcgggtgacgcttcgtgacgtctcgccgaggctcgttgcgttccgacggatcgggcgccccggccgcgatcgcgtcgccgccgggatgcatgagatacagcatcggcgccagcgcggcgatcgccatcatccacccgaaatcgcagatgtagcgccatcccaggcccgcggtgtggctgtcgaacaccgccagcagcatcgccagggccagggagcacgtggcgagcccccaataacccgacctgtgcatcctgcgccgcaggaacggggccgccagcgcgagcagcagcagcgggcatgtcgtgaacaggccgccggccatcggctcgtaatagccccattcgcggaacgccatgggcgtcatgccaatgaaggggaactccgacgtgaaccgcaacggcaggaacaggtaggcgcccaccgacggcaggaaattggccgtcggctgcacgaacctggtcatgtcggtgacggtcatctggtagtcattgccgaaatccagcggcgacccgaaccgggcgacgttgtaagccatcagcggcagcaccacgatcagggcggggatgatgacggcggccggcgctcgcagggcccttcgcgggggcagggagcggcttttcaacccctgcagcagcgaggtgatctgcggccagaagatcgggaagcacagcagagcggacagcgcgaacgtgggccggcatccgaaattcgccgcgatgcatgccgcgccggcggcgagatggcgcagcgatagtggttgggcgcccgcgaccgaccagctgcccacatggacgtgctccccgcgcccgggatgccgttcgggtgtcgctttgagccacagccacaggccgagcgtcgtgaacatcagggatgcggcgaagggcacggagtagaaattcaggcggaaatgcagataactggcgttcgagccgagcaggaacatcacgatgacgatggacgtggccgccaccgatgcgttcgggcacagacggtgtgtcagccgtatcaccagcaggcatgcgaagacggcgaacaggaacatcatcagcagtatgcacacggacgtgggcagcatcatgccgccgggcgtccatagggacgttatcgcacggaacggcaggaagaacagcaccacgggcaccacgccgaaatacgaataccagtggccgccatagaaggcataatcccagaatatctgcgtcttgccggattcgaacagctgaccgcgcaccaggatgtcatgcgggttcgcagcctgcgccagctcgggggagaccggcagatccagccacacgcggccgttcagcagcgactgcgcgacatggtcgtactggtcgaagtcgtaggtgtagccatgcgggttggggaacaccagcggcccggagacgaggaattcgccgacgatgcgcaccgtggtatagatggccagcggggcgaggaatgccacgagcgcccaccgctgccgtacgctcgcgggattgagccgtatgcgccacaacgcggagccgggtcgccacagcgcgaccagtagcgccaccgcggccatgatcgacacgcgcagccaactgaactcgaagggaacccgaacgttagctctgaccgcggagaacgggatacgagagcccacgggctcctcgatccacaggcgaaccgagctgcccggcttcaccttaaggtacagcgagcgcggcgccgacgtggagacggaggtgatctcgccggtgcgcgaatcggtgtcggcgcgcacgaacacgttgttcgccgctttgacgtcgccgccttcgggcgtgttcgccgcctcgatgcgcacgtatgacgacgtgccgtccgcactcacttccatgtacgccgacgtcgggtcggtgacggtgaggatgccgtcctcgccgcgtttgagaccgtctcccatgacgttcgtcgccgcggcggaatcggtgctggcaccgagcgtggtccagaacggcatgttgaacgccacgcattcgatcaccaggatcgccagcagcgccacaagcatggctggcagtgaccgtcgcatgtggtctcgggaaatgatggaagaacgcaccccattattctatcggcttcatgtcgggttggattgaaagaatgtgtgccatgttccgaaacgcttcacacttcccgtcagaaggctctcttggagggctgatctcaggcctgtccggcgcgttgcgacaggtgggggacgccgccgcgtccgtattgggcgggcgtggcgttcgtatggacgaggacgggcagggaccgttcgaggcggcggtgcaggccgcggccgggtccggcaacgacacggatgcgatgatggccgcgctctcgaagcattcggtgagattgacgccgcttatcaagcgccgcgtgtttcccgacctgcccggtgtcccacgcggtgtggcgctgggatgggcgcagctgacctcgggggagggcgccaccatctcgatagggctgttcatcgggcatgaccgtttctcgcagatcgcgctcgccgacgggaacgggcgcgtgttcgtgacctccgacccgcatgccgatacgcatgatatgaagccgcggttcatgctcgtcaaggaggaggagctggacgccgtcgacggcgcgagattcggcgcgaaggcgcggccgccgtctgcggtgacgggggcctcgaccggcgagtcggcgggcacggtccgcgcgtttcagggcggcatcgtgggacgggacgccacagggcgcatgacatggcttgcctcgtggctgaagacgggaaaccggtacaccctggagcagatgcgctccccgctgcccgcctcgctgcggcagcgtctggattaccgtgacgccatctccattgccttcctcgccgcatacatgctgcccgaaatgcgggggctgctcatcgggttcggatcgggcaacatcttccgtcgcctcaaccgtgaggcgccgatgggtgccatacgccgcagcatacgcgacacgatggaggctcgcgcgcacggcatgcgggcgtccggtctggaggatcatttcgccgacctgatgcaagaggccggcgccctcgaccatgcgtccggcctggaggcggtgcacggggccgaaccgctacacctgtatacgtccagttactccggcgggtatttcttcgcgtgggactccggactggagttccgcgccgcgctgcgctcgctgagaatcgagggcaatctcaaccgtttcgccgcagtgagcgcgtggatcgaacgatccgcccgcaacggcggcgtgaccgaggacacggtcacgcgcgcgcaggccgcgcagatcgatcttgcgctgctggacgatccggcgctgatggcgctgccttgggaagggaaccccgcgatatccggaatcgatttcccgcacgacgacggcgtggcggcgatacgacacgtgtggcggtacgcgggcgagaccgctgaccggatgcttcaagacaatccgaatcccgcgggcgggcggctcggttccgacccaggggcgtcagaatgggtgtaccgtcaggcggtgtcccggctgctgcgccagctgaggctcccgtatcgcttcgacatggaattccgcagcaatctcgaacaggggacgaccgcggtggcgttcaccacggcgggcccctccatgatgccggaaagccgctatgacgagcgcgcccacgattgggtctcgttctcgcagggggaacgggccgccatgagcgccgcgtacaatctccgcgtcgggctcatcatcgcggcactgtgcttcggcgcgagcgaacgggtcgatcaggtgtgcgtgcgcatcgattccatcggtctggaagaggcggtcgccgagcaggacagcgcgatctccgatctgatgagcgcagcgctgcgatcgttcgagcgcctgcacacgggcgatgccggcgcgtccaaggccgatccgaaggacggcgaccatcacggcgatccttcgcatacgccttccgcggagccggcgcctgatgcccgcacaccgcaggcggatgccagaggcgcccaggacgcgaagacggattccgccggtgagtccgtttctgcgaccgtcggggatgatgatctgcagtcgttggagagcttcgccgacatgatgaaggacatcaatttcgaagacttcgtacgggactccccgcaggaagtccaggactccgactccggcgatacgggtcaggcggatgacgccggagcggcccccggcggcgaaggcaacgaagaaggcgacaccgaccccatggatgcgctgcgccgcagccccaccgtgcgaaacctcgtcaccgtaacgttcaccagacaggagttgctgcagcggctgcgcgaagacgcgttgcggcaccccgccgacacctatcgcctgttcggcgcggtgatggacatcgacgagcggggcggactcgcccccatcagcgccgaattcgacctgcgcgacgcgaggttctccccgacgggctcccaggaggagccggaactgtcggacaaggtcttcccggcgactgtcgccggcattctcggcacgggcaacgccgagggcctgtccatccagcgggcggacctgctgcagcgctgcgtcgacgaattccaccggctcgccgccgacgggaccctggcgtcggtctccaaggcgcagcatgcgatgcatgtcatcgaccgcgtcgccgatccggagctgtccgaattgtcgtcacgcgtcaccagtgcgctcatcgacggtaccgacacaccggacttcaccttccagctggcggacgaactcgaccgggaacgcacgcgggcccgcgacctgctgttctccggtcaggacgatcaggccgtgaccgtcgccgaagcggccatcgaacgtgtggaatcggcttatgccgacaatccgggcgtgccacggtatttcaactcgtatgccgagcgcgtcgtctacaaccgcctgttcgccacggacggcgaacgcacggtgctgatccccgacaacctgttctacgcgcacaccgagctggcggacctgctgtctcagctcaagggcgcgaaggccgcgctgccgcaccttaacgcgatggtggcgtatgctcccgcttacccgttctcgcacatgaagctcgcagtgcagctcgcccgcaacgaggattgggattccgcgcgcgcggcatgcctgaacgcgctgcgcgtggcgctcgaccgtgatgacgccgcattcgcctactaccggctggcatacgcggaatggatgcgcgaccgtttcgatatcgccgccgcggcctacatcatgagcgagcacatcgcaccggggcagatcggggcgcttgacggcgagctgagggaactgctcgcacgcgccgaatcccaatgcatagcggtgcctaccgacgtggagtcggcagccggcgtgctgcgcatgcacgatctgccggtgtggccccacacccaggtcgccgcgatcgtgcgcgacgccgcccgcgtgtgcgtggacgagggcatgttcgttcccgcacggacgctgtcgatggcggccgcccgtatgaacgacggcgacaacggcggtgtcgacatggtgcagtcccagttcctgagatcgctcaactcctgatgccgtggcgcgggcgtcgccgaggcgggttcatgttttcgattacaatcgaatccagatgaattcgcacatacgaaggggaagtgatggctcgcgcagcggtttcgcaatcatccggcgaccagttggcttgggatttcgacgatccggacgccggggaggctccggcgccggtcgagaacgaaggcgccgcccggttcgcgcccggctcatcccagtgggtcgccgcgctgcagtccacggacgctgatgcggcccggctggatcggctggatgtgtcctcgctgtcgaacgaggttgcagcccgcctgtgggcgcgcgtcgcggcgtgggtcgaggccgaccagatcgcctattacatcgatgacgcgccggtctcgtccgacgcggcctacgatgcacgcttgcgttgcctgcaacggctggaggcggagttcccgtcgttggattcaccgcaatctcccacgcaccgggtcggcggcacgttctccaatgatttcgcttcggtgcggcatccgtcgcgcatgatgagccttgacgacgtgttctcgatcgaggagctgcgcgattggtacgattcggtgctgcgcgatttggactggcctgagggcaagccgttgccgatgacctgcgaggtgaagatagacggcctggcattgaatctgatataccgcaacggcgtgctggaacaggggctgacgcgtggcgacggcgtcaccggtgaggacatcacgctcaatgtgcgcacgatcggctccattcccgccaatctcggcgggccggccgcggatatccccgagttcgtggagatccgcggcgaggtgttcatgcgttgggacgatttcaaggcgctcaacggtgaacaggaggatgccgggcgccctccgttcgccaacccgcgcaatgcggcggccggatcgctcaggcagaaggatccgcgcatcaccgccacaaggcggctgagcttttacgcgcatggcatcggtacgctgcgctggggctcggggcggcccgccggctcgcatgacgtcgtcgccgaccagtccgaggcgtacacgctgtactccaagtggggagtgccggtgtcgccgcacaaccgtgaggtcacgtcgttcgcgcagatcctcgacatgatcgactattacggcgagcaccgcggcgacatcgagcacgcgctcgacggcatcgtcgtcaaggtcgacgatctcggcctgcagaggtcgctgggcgcgacctcgcgggcgccgcgttgggccatcgcctacaagtacccgcccgaggaggtcaacaccgaactgctggacatcaccgtgcaggtcgggcgtaccgggcgcgtcacgcccgtcgccgtgctcaagcccgtgtatgtagcggggtccacggtgtctcgcacgacattgcacaatccgttcgaggtcaagcgcaagggggtgctgatcggcgacacggtggtggtgcgcaaggccggcgacgtgattcccgaactggtcgggccggtcgtggaacgccgcaaggggcgtgaagacgacctgcgcgaattcgtcatgccggatcgttgcccgtcctgcggatcgaagctcgcaccggccaaggagggagacaaggacattcgctgcccgaacgtggaatcctgccccgcccagctgaccgagcgcatcatcaacctggcttcgcgcaaggcgttcgacatcgagcatctgggcgaccagtcggccatcgcgctgaccaacccggaggagaaccggccggattcgccggatacgttcgctccgaacatcaccgagattctcgtcaagcccggcgaggagccggagccgtacgagcccgtggagggactgcggctgccggaacggcagaagccagtgctgtcgagcgaagcggggttgttcacactggacgccgcggcgctcagggatgtgcgcgtgtggcgcgaggccgcgatcatcgagatccatgagacggtcacggccgacggcaagaccaagcgcactcgcaaacgcatcggtggctcgggcctatggcatcaggtcccggcgttctggaccgcgcccacgccggcgaagaagctttccgcgcgacggcaggctgcggcaggtgcgccggccgacgctgcggctgagccgtatccgggatatgacgtgccggccgatgctgtggtcgtgcgcgtcgatcggaagaccacacgcaacggcacggtcgacgtccccgtgtacgtccgccccggcgagaacacgcgcaagatgttcgacgagatggacaaggcccggcacgccgacctgtggcgggtgctggtcgccttgtcgatacgtcgtctcggcccgcccacggcccgtctgatcgcctccgccttcggctcgctggaggccatcgagcaggcgggcgtggacgagctgtcggccattgacggcatcggcccggaaatcgccgaatcggtggtcaattggttcgccgccgcccgtgagccgagggattggcggggcgagacgctgcgcgcctggcaggcggccggcgtcggggtcgccgccgccgagaccagcacgctgccgcagacgcttgccggaaagaccgtcgtcgtgactggttctctggagggattctcgcgtgattccgccaaggaggccatcatcgagcgcggcggcaaggctgccggctcggtcagcaagaaaaccgattgggtcgtcgtcggcgaaaatgccggctccaaggccgccaaggccgaagaactcggcatccccatgcttgacgaagcccaattccgcaccctcttggaaaccggcgccgtgcaatagactgccgcccctctccgctgacggagggctgtcgcggagcgactggggtggtctatgcctataaacccgcccctcagtctcgcttcgcgagtcagctcccgccggcgggagcaagtacccgccccgcgctttgcggcccatttcacagggtggatttcacgccgcctctggcacgccgtcgattcacacgctagtctggtacgcggcaataaggaggataggatacatgacagacgcacgccacatcgaggcgcagatctacgaacggctcagcaaagtcatcgacccggagctcggacgctccatcaccgatctggggatgatcgccgcaatcaacgcggtgggcgtcacctcccagggcgacggcgacgtgccgtcatatgacgtgaccgtgcatgtggaacttacggtcgagggctgtccgctgtcacagaccatcaccaatcagatcaacggcgcaatcgtctcatatcccgacgcgaagctcaccccgcacatcgaggtctcatccatgagccatgacaagctcgccgacctggtggcgggtctcaaggcggagcgcaagcagaatccgttcaacaaaccgggcgtcaagacgcgcatcttcgcgatcgcctccggcaagggcggcgtcggcaaatcatcggtgagcgccaatctggcggcgaccttcgcggcgctcgggtacgacaccgcggccatcgacgcggacatctacggtttttcgctgccgaagctgttcggcgtgcacacgcagccgacgaacctcaacggcatgctgatgccggtgactgcatggggtgtcaagctgatttcgattggcatgttcgccggtgccgaccgtgcgattctgtggcgcgggcctcgtctgcagcgttcgctggaacagttcctgtcggacgtgtggtggggggatccggacgtgctgctgctcgaccttgccccgggcaccggcgacatggcgatttcagtggctcaggcgttgccgaacgcggaactcgtcgtcgtcaccactccgcagccgtcggcttcggatgtggcggtgcgctccggtctggtcgcattgcaggtgccgatgaaagtacgcggcgtggtcgagaacatgagctggtatgagcataagggcgagcgactggagatcttcggcgcgggcggcggtcggcgtgtgtccgatcaactgaccgagacgcttggctatgacgtgcctctactcgcccagctgccgctcgaccccgatttgcgcgaggtgggcgagtccggccgtccggcggttctgaacgaggacggcgcactgcgctcggatgccctggggcgcacgttccgggagcttgccgagggtcttcttcgcagcgaatgattctcaataagaaaggtgcgaggattgcgcacaaatacgcacagtcgcacattcctaggagtggcggaatagagccgtttctgcatatttcatgtgcgtttggccggcagtcggactcgcacctttcttattgagaaccgttcgctgcgagccagtagtgcaaataacgctgccggttgacgatgtcccgcaccatctcgatgaaggcccgccttgattcctccgtccgcaggtcattcgcggtgaccatgatgatggtccagccattgtgctgcagctcgttgaaccgcgcggcgtccttgcgcatctgctcggggctcgcatgatatgcgccctgatattcgaatcccaccttgcagtcggggtaggccatatcgatcagtctggttccgtgcctaagcctcactcggtaattcgcatatggcctgccgagccccgaatccaagagaatgccgaacagaggtgtttcgggtggtgaatccgtgtcctcgacgatgtacgggagcgcctcctcgcattttctcttccccgcgaaacggggactcgcgtcgaggtatgcggcgaagtcgtctttcctggccttcttcctgcgttcctcgcggctggcaaacgccgaggctatcgtcgccagggcttccgtgtcgcagtaggttgccatctgcgcccatgccatggcgggggaggccatccagaaccgttcatattcgtatttgcagtattcctcctttccggagaacacgtggaatgtgactccggcgatgtgattgcgatcctgtgcgcgaggcacgctgacatggacgcgattcgacgccagatcggtcttcggcacgggagctccccagtatcgtatggcgttgatatatccgaccctgagcggtctcttggtgcgcatggcggcttcattgcagcgtttgcgttcgttccgccgcccgttgactatatccgtgttcatgaatcccatggggcaacggtatggaatggaacgtgccgatggcaagcgatttcggggtatgtggtcgaaggctaggcatttttggcatgtcttcggcgtgttatccacattccatgtatcagcgaacggttctcattaagaaaggtgcgagtcggttctgcgggtaaacgaacatgaaattgatggaaacggcgttattccgccgatatgagaaatgtgcgattgtgcgtatctgtgcgcaatcctcgcacctttcttaatgagaatgattcgctgatacatcgggggggggggaaagagaaggagggagaaaaagatgaggaggggaagagagaggaagagataatgaaaaagcccctcggcactcgccaaggggcttttccatgagcatctatcagatgtggaagtacagctcgtactccagcggggtcggggccaggcgagcctggtcgatttcgccgcgcttgaggtcaagccaggtctcgatcagatcgtcggtgaacacgtcgccggcggtcaggaagtcgtggtcctcttccagggcgttcagggccgcgtcgagggagcccggcacctgcttgatgttggcgtgctcttcgggcggcagctcgtagagatccttgtcgaccggctccgggggctcgatgtggttcaggataccgtcgaggcctgccatcatctgggcggagaaggcgaggaacgggttgcaggacggatccggtgcacggaactcgatgcgcttggaagcgggggaggttccggccagcgggatacggatggcggcggaacggttacgggcggagtagaccagcgaaaccggagcttcgaagcccggcaccagacggtggtaagagttcagcgacgggttcgtgaacgcgaccactgcggaggagtgcttgatcagaccgccgatgtaccagcgggcgatgttggacaggccgccgtagccctgctcgtcgtagaacagcggcttgccgtccttccacagggactggtggcagtgcatgccggtaccgttgtcgcctgcgatcggcttgggcatgaaggtcacggccttgccggcgagcgctgcggtctcgtggacgacgtacttgtacttcatcaggtcgtcgccagcgtgctgcagggtgttgaagcggtagttgatctcctgctgaccggcgccggccacctcgtggtgggagcgctccagctgcaggccgaccttctgcaggttggcgaccatgtcgtcgcgcaggtcctggtagtggtcgcacggcggaaccgggaagtagcccttcttgacgcggttcttgaagccgatgttcggggtgccgtcctcttcggtgtcgacgccggagttccacggagcctcaatggtgtcgacctcgtagaaggagcgctgcatggagttctcgtagcgcaccttgtcgaagatgaagaactcggcttcgggagcgaaggaagcggtgtcggcgatgccggtggacttcaggtaggcttcggccttgccggcgacctggcgcgggtcgcgggagtacggctcgtcggtcagcgggtcgacgatggagaaggccacgtcgagggtcttgtgcttgcggaacgggtcgacgaaggcggtcgtgacatccgggatcagcttcatgtcggactcgttgatggcttggaaaccctgcacggacgaaccatcgaacggcatgccgtcggtgaaggcgttgtcaatgaattcgctggccgggacggtgaagtgctgctgaacgccgatcagatcggtgaaacgcacggagacgtactcgatgccttccttgttgatcagtgcttcgacctcttcaggcgtgtgggcgaaaatcttattctctgccacaatcgctcctttgttcttgagaacttgtttgagaacttacaatcgacaagtctagaaatgtgagtttcacgcgctcgtcaattgggttacgattatgtttcgagatgggcaacaggcggtgtaatccgcgtttttccaatgttttgggatttatgaaattcgtcgcgtctcagtgtcgcgtttcaagtagtggacggtctgacggttgtcggtcgggacccggccggatatgggaaagcccccgcggcgatgtcccgcgggggctttcccgatgtatgaatgatgccggttcggcgtgaggttgcccgccgaagatcagcggcctcgcatcgcgcggcggctgacgtgctgcatgcgcgtgggatcgatgcccttggggatgcccatgccgttcttggtctgcagtgtgcgcagacgggcgttcagtttctccagctcggccttggtgaggatgaaacgctcgcgcgggtggatcttcgccaggagagcgttcttgtggtgcgtcgggcggtacgccttgcggcggatgatgttgctgcgcagcttcttcagcggcacctgaccctggccgttgccgaccatcacacggtacacggggatctgcgagccggcggtgacgctcttgatggactgctcctggcggtccatcgcgcgcttgacgcgatcgtaatcaccttcaccgagcaggtagatgccgttgtatccggtgccgcgccaaatggcgtccttggtgcgcggatccacccacaccggctgctcggggaagttgaagccggccttgttgatgttgcgcagcacgctgatggccgcgccggtcttgccgtcgagctgcttgtatccgaccatgtcggcgcggcgggtgagcacgatggtcgacagcagcatgccgagcatgatggcgatgagcatgaggaacacccacgtcagcaccgtccaacggaatatgatgccgaggatgacgaacacgatcacgggcacgaggaacgcgccggcgatcagcgccggaagcatcttgtcttccttgtgcgtgtacttgaagatcgttatgatctgttttatcgtgccctgcttcttgggcttcgtctgcttggtcttctcgtccttgcctgccatcaacttcctcgcttggtctagggtgaacacactgagcgacaagtttaccagcagatgtgcccttctgccgaccatgagccgccgcgtcgctcgttcgcggtgtctttatcgggtgtgcagcggccggtcgtcggctttgagcagcgtctcgcccagcgtctcgctgaaggtgggatggggatggatgagacgcgcggcgtcggaaagcggggtgtggttgccgacgagctgttccgcttccgcgatgatgtcggatgcgacgggcgcgaccatgtgcacgccgagcacgaccctgacgccgggctgttgcgcgcggatgccgctgacgagcgacagagatccgccggagtcgctcatcatcatgcgggcgttggacatcatcgggtacacggtctccttgatatcggagaggtcgtcgcgctgtttcgcgtcggtcgcggtcagtccgacgctggcggcctcggggttcgagaacacgatctgcgggatggtgtcctcatcgagcggctttggatcgagtccggcgatggattccgcggcgatgatgccctgctcgaacgcgcggtgagcgagcgcgtgcccttcggtgatgtcgccgacggcccatatgcctgcgaccggcgtgcggccgtatccgtcggtcgtgatgaatccatggtcgtcgacggtcacgccggcgtcacgtatccaaccgtcggaggtcagcggatcccgcccgatcgcgacgagcacgaattcgccttcggcgatgtgctcggtggagccgccgtccttggcgctggtgtagtgcacgagggctcccatgttgacgccggtgtcgatgtgggtcaccgtcgagcggtcgatgacgtcgatgccgtgtcgtttgagctcacgcgtcagggtcacgccggcgcggcgatcccatccagagagcacacggtccttgcggataagcatcgtgaccttgcatccggcggcgttccacatggaggcgaattcggcggcgatcgcgcccgcgccgatgatgaccgcgttatgcggcatcgccatcgacattgcccgcgtcgaatcgatgatcgcgccacggaacggctcgccgggcagctgccgcgggacggatcccatggcgagcaccacgtcctgagcggtgatgtcgtaggacgggccgatgtcttccggcacgtccgagcgcacggaccgttgcacgccctgcccgtcagcaggtgcggcgatgtgcacggtgatgggacgtgccgcgccggtgatcgaggcgatgccccggaacacggtgacgccccgatgggcgagcagacctgccagcccttgcgtcatcgtgtcgacgatgcgcttcttgtaatcgtgcagcgtcccgtagtcgatgccgttgatggtggcggagatgcccagttcgccggcgtgccggatggagtcgattgcgtgggtggcgctgatcagcgccttcgacgggatgcacccgcggttgaggcaggttccgccgagcgttgcgtcgcgttcgaccatggccacgcgtttgccgagctcggccgcccgcaatgctgtggaatatccgccgggtccaccgccgattatcgcgatgtcaaaagcttcactcatgttcgactcctttgtgctcgtaccaaaaccatccccatcgtaataccttacgccaaatcgccccccccgccggcgagctgggctgtggagcaaataacagggctgttcgtaggccaagagcgagcaaggtgggtgctgtcttgccctcgctggcggcggggctgtcgagcgcagcgagactggggtggtttcacgcagcctagggcatacaaaaaacggcgctcccactatcgggagcgccgtcaggaaagcagcagggcggctgtcacttcggccagttgccgcgcttggggctgcgcggtttgggcagacgccagcggcgcacctgaatcgcgcggctccaagcatacgatgcggagcgcgagcccttggcaacggatgcctcgccatacttctcgatgagcttcttcttcagcttgcgccacatgacagccacgtcgatgatcacggcaatcaggtacacgtacagcagaatcatcatcgggaccgacagctgcggcgcgatggtggtgacgagaatcgagccgagcagcatgacgaacgcaaccgggatgaagaactcgccgaggttgcggcgcgcgtcgacgtagtcgcggatgtacacgcgccacggcaaccgttcggccttcggcatgcggttgatgtcgccggtgcgcatcgcctcatactcttcgtcctcgcgcttgcggatccgctccttcgcggccttggcgctggccttgcggtccggcggcaccagaggacgcaggttacgcgcctgcgcctgcttcatcttgggggtcggacggcctttcccgacggtcttggcgggcgattcctcttcgaccggctcctgggccttgtccttcttgaaagggttccatgtcataatccgtcagaatacggccacgcctcgacgctggaaagccgggcgaaccggttacaatggcagctgatatgaccatctgttccaggccggccggttcgtgccggcgggatggatgatgacgaacgcaacagtaaggagcatcatgaccgcagtgttttccgacgagctgcgcgcgcgggtcgaagccgatttcggccgcgtcgtcgatctgctgggccgtaaggtcgcgctgaagtcgatttccgccgagggcatcaccgccgagcatatgaagcggtccgccgaattcgtagcggacgagctgcgccaggtcggcatcgacgcgaaggtcgtccaatcgcgcaacccggatggcacgcccggtgcatgggaggtcatcggctcgaagatcgtcgacccgcaggcccccaccgtgctgctgtacgcgcaccacgacgtgcagcctgtgccggatccgtccgcatgggacactgacccgttcgtcgccaccgaggtcggcacgcgcctgtacggccgcggctcggcggatgacggcggcggcatagcgattcactcgggcgcgatgaaggcgctcggcgacgatctcaaggtcaacatcaaggtgttcgtcgagggcgaggaggagatgggctcgccgagcttcatcccgttcatcgaggatcatcgcgacgagttcgcgtccgacgtgatcgtcgtggccgactcgggcaactggtccgccgagattccgtcgctgaccacgtcgctgcgcggcaacacctgtgtggacgtgaacgtcaaggtgctgcaccatccggtgcactccggccagtacggcggccccatcctcgatgcgaacacgctcgccgcgatgctcatcgcctcgatgtacgacgccaacggcgaccttgctgtgccgggcgtggccgcgcaggagccggtcggtggcctgcagcgcgaccttgacgaggccaccgtgcgcgaggacgccggcatcgtcgactcctatcgtctcgccggcaccggttcgctcgcttccaggctgtggaccaagccgagcgtgaccgtgatcggcttcgacgcgcatccggtcgagggctcattcaacgtggtcagccccgagaccacgttccgcctgtccctgcgcaccgcgccgagccagcacccgcaggaggcgcaggacgcgcttgccgcgttcctgcaggcacacgccccgttcggcgccgaggtgaaggtcaccaagttggagaacggcatgggctgggcgatggacccgaacgcggtcgccaccaaggatgcactcgcggccatggaggaggcgttcggcgtggcgccgatcaacaagggcgagggtggctcgatcccgttcatccctgagctgcagcgcatcttcccatccgcgcaggtgctcgtcaccggcccggaggatccgaaggccaacgcacacagccccaacgagtcgatctcgctgcccggcttgaagaacaacatcctcgcggaggccctgctgctcgccaagctcggcgagtaaggccggcaactgcccccgtttccccgggaacaggttgggtggcatacccgaaacgggtatgccaccggtgtgctgcgacgatgcggtgccctccgttccggtagccggcggcgtttttttcggttgcccgccgtggctcttttggtggtgcggtgaacaatagagggaatgaacacatactccgaaccggatcatttgaccggctattgcgccgatgccagagtcgccatcgtcgacaatgacgagcgcgccttggagtctgtagtctcgctgtttgctgatcgcctacctcaaacgatgttatctggtcgacgactgaggggttgagagcaatcaaatcatgcaaggagcatgagctcaagccggatctgctgcttcttgatatgtcatcggaaggcatccaggggccttcggtatgtcgtggcatccgtagattcgatgggagggcctgctatgaatggacttcatagcatcatatgatgggtgaacgggatcatcgaaccaaaggcggtcgaggatgaaaaaacggcgtaatcgcggcaaaaacggcaaaacagtcggcaatggcagcatctccaagacccgcaatagcggacgtatatctgtgatatggctgctgctggccgtggtggtcgcggtgtcgctgacggtcggggcatgcgctttgtggctgcccgaccgggcacccgcactgctcggctccgccaaggagatcacgagcgcgccggccggagtgcaggagtacacgggagccacccaggtcaccatgattcccacggtctctcagacgcgcgaactggtcggcaacgcctccggcacagtgacggaggacatgtcatcgcagggattgacctctggcaagaccgcgatgaaggtcaacggagtctcggtggtggcactggcgacagccacgccgatgtaccgcgacctcgccaccggggacaaaggcgacgacgtgctcgccctcaacaacgaactcgcgcgcctcggactgccggcctcggcgaaatccaccacatatacatggaacacgtctcaaggagtgaagcagctcatgagcgccgccggcaacacgtcggacggttcattgccgctgaccgacgtgctgtggatacctgccgcgagcgtgcgggtcggcgaatgggccggcactgtcggggcgaccgtggccgggggaagcgtcgttgggaaggtgcccggcagtgtcacgaaattctccatccagaacgggcagccgtcggaactcgaccggacggtcaccctgatcgggcagaccgccacgctgaaagccggcaccaccgaagtggatgacgccgagttctgcgccagagtcgccgccacacaggaattccagtcactcaccagcgacatgctcgccacaggtctggaagccagcgtgcagcttgtgaatccggtgcaggcgctgcgcgtgccggccgcgtcggtgatcggcgtcaacggcagcaaggggtgcatcgtctcgggtggcaggaccatcaaggtgtcaattgtcggatccgagctcggggcgagtctcgtcgagccccaaggcgccgatgccgcggctatcacctcggttgagataggcagtggtttgaccggcgaaagctgccgatgatgacgggggaagatgtatacgccggtgccggagtcggtgccgcgccgcagccggagcgatcggtgagcgtacatgatttggcgcataggttccccggaacggacgtgttgttcgaacatctggatttcacagcgatacccggccagaccgtggcgatatgcgggccatccggatgcggcaagtcgacgctgctgtcgattcttgccggatgggagaagccgtaccatggcacggtggaacgcaagaacgtggaacgtgtaggctgggtgtttcagaacccgtacggcgtgcccgggcgaacggctctggaccatgtcgtgttcccgctgctggccaaggggctgcgccggcgcgaagcggagccgcaggcgttggaggccatggggctgttcgacttggagtatgcggccgaccggcggttcagcgaactgtcgggcggcgaggcgcagcggctcatgctggcccgtgcagtatgctccagacctgacatgctgctcgtggacgagccgactgcacaattggatacgcgcaccgcgcactcggtgagccacgtgctcgggaacctggccggacagggcatgatcgtgctggtcgccacccatgacccggacacgcgcgacgcctgcggtcgcgtcatcgacctggccgactacgcccccggcgataacgaggactccggttttgcccccgctggcggaaacgaacccgctgagcctaccgatcccgcccccgctggcgggggctcccgcgaagcgggtgggggtggtcccaccgactcaactgacatcgccgaaaatggatcggaggtgcgctcatgagactgggatccatcatctcggagacgctgcgcaacatcgcctcgggcaccgcgcatgctctcgccatgttcctcgccgtgctgttcgccggcaccctgctcggaggatacgaggcgatgtcggtcatgaggttggaaaccgaagccgcggtgcgcatccgcgcattcgccgacgtgaaaaccgtggtcggcggcaatgtcgacggactcgcctgcgaccggctctccgaccatggcgacccgtcgttcatttccggggcgatgcggtccggcccgcaggtcgtgccgctggcaacgaatggcatcgaactgtcatcatatgaggtgaccgcgggcatgatacggctcatcaccgccgaagacccgcaggaggttccggactcgtccggcgtgtgggtgtcatccgacgtctcccatgatttcggtctcgtcaaaggcagccgcatgcagacgaatcatggcacggtcaccgtggcgggcgtgttcgattggccgaatgacggcagggacatgcggttcgcctatgcgatgatcgcaccggcggcatcgagcggcggcgtgttccaggaatgctgggcaaagcagtggccgcaaagcgaccagatggacgagctgctgttgtccaccgccacgaagaacccgaaatcggagatgcgtcccggtgtgaccgctcttaacaaggggttcgatgcgcattatgacgcgcagaagggctatctgacccgtgtgacccgttggatgccgtatcttggactggcggtcggcctgctgctaggcgggatttcggtacgccgccgccggctcgaatatgcaggcgcgttgcactcgggcgaatctaagggcgcgcagctgctcggtatcgaactggaatcactgatctgggcaggagtcggcacgctcgcgacatgcgcgctgctctccgcgtacgcgctgcgcatgtcgcagtccgaccctcttgccgtgttgctggccgccgttcgtacgccgctcgtgttgctggccggagtgctcgtctcctcgctgttgacgggatcggtgatccgacagacgcagctgttccgctacttcaagaaccggtagcgcctaatcccgtgtcacttcgccagtcccatctggtatttcagggtcattacgcgcgttgcggaggccgtcaccttcttcgcgaaggccgggtcggactgcgcacgggcgatgataccgtcaagaatcggcgtcacatatgacgtatcgcctatgcacgccaaatcgccgccggcgtccaccagacgcacgcccaggtccttggtcgctatgccgctgaccgccgcggccgaaagggagtctgagatcaccacgccgtcatagccgacgctgccgcgcagcgtgccgtcgatgatcttgctggagaacgcggcgggcgccgacgagtcgatgcgctggtaggtcgccagcgacatcatcaccatagccggcttcgcctgcttgatcgtggtgttgaacgcgcctatctcctcgtcatcaagcgtggtcgtggtgtcgaggatgccttcggtcgtgaaatcggtattgccggtcaccgcgcccaaaccggggtagtgcttgacggtcgcgccgacgcccgcgtcgcgcatgccttcgacgaacgcgatgccgtgctgcgcgtttccgttggaatccaaaccgaaatcgcggttcagcgcgccaatcggagcgttcgaggaacgcttgacctgcaccgtccccaataccggggccaggtcgacgttgatgccggcttgcttgagctggccgccccaggtctttgcggaggagcgcagcgtgtcagcgctcatctggccctgcgccaccgcggacggcatcgtgtcgaatccactgcccttgagatgctgcacctggccgccttcctgatcggtggagacgatcagctggttgccgctcggagcatagctttgcagcgcgtcagcggcggtcttggctgcggctgtgccgttgttccagttgccgatgagcaccacggaaccgacatggcgtgtgctgatgagggcgctgagatcggccggattgccgcctgcgaacatcggtgccatgatgagctgcccggcccgttcatcgagactcatcgtggcgatggcgcggctcgccttggccgcgggggagtcatcggctgccttctgatgctcctgagatttcggtgtgggggccttgtcgcggttcagcgtcgaagaggaggactgtggctgcgcgagatgttcgagcgcgtctttttgctgggggcgcagcatccaccatgccgtgcctgccgccacaagggccaccacgcagagcatggccgcgatgatggtgggggctgaactggggcgcggccttctgccgccgtgtttgatctgctgcatcctcatatgcactagcgtaggccatcatgtgtagtggttgtgagacggttgtgcgacggctgtgttctcagctcagagcatgaccagctttcctagcctttcgataggcttgtatcatgtctttttttgatatgttgggtatgttcgatcccggcgacgggccacgcgggccacgtcgggactccggtgcgaccgatgacgatccggtgatcgtcgacgtgcaggcggatggcgacgatcatggcgagacgccatccgccggcaagggggagccgccgaagcgcggcgtgccgaggctcacgccccgaccgttgccgaacgggcccagcaaggggacgaagattctgatcggcgtcgtgctggcgctggttgtcgtcgtcggcctgttcttcggcctgtcgcagttcatcacggacctgatgtggtacggacagctcggttttcagaacgtggtgtggacccagctgggtgtcaagttcggcctgtgggcggcgtatgcgttgctgatggccttggtcagctatgtgtccgcttggctggctatccgcgctcgccccgattcgtccgacggctcgacgttccgcatcaaggatgacgtcatcgaagtgggcaagtcgttcagttccaagaccgcgcgtcgcgccgccgtggtcgtgtcgctggtcgtgggcgtgatgttcggctcgcagttcaactcgaactggtctgagatcctgctgatgttcaacgcgcagagcttcggcactgccgatccgcagttcggcatcgacaacgggttctatgtgtttgtgctgcccggtttgcggctggtgatgtcggccgtatcgatgctgctgctgatgggcattgtgttctccgtcgtcacgcatgcgatgatgggcggcatccgcttcaccatgccggtgcatggtcgcggagtgctcgctgtgaccaagcgcgcccgtcgccagatcggcatctggctgatcctcaacatgctggcctggtccgcgcgccaggtgatcggcgtgttcacgcatctgacccagcagggcgaccgcatcaccggcgccgcatacaccaccgtgcacgcgaccattccggtcacgttcatcatggcggccatcaccgcgatgctcggtgtgttcctcggcgtgtggctgatgcgttcccatgcgttggaaggcgccgccaagccgagtgtccgcgccgccgcggctctcaaggcgtggcgtacgccggtgattgcgatcgccgccgcgctggtcgtctcgctggtgctcaccgtcgcatggccgatgctgctgcagcggttcaaggtgaacccgaacgcgcaggagatggaatccacctatatccagcgcaacatcaacgccacgcagcaggcgtacgggctcgacaaggtgaaggtcgaacagtacaaggccaccaccaagggcaagtccggagcgctgtcgtccgaggccgaatccaccgcgcagatccgactgctcgacccacaggtcgtcagccccacgttcaagcagctgcagcagtcgaagcagtactacacgttcgccgacacgctggccgtcgacaagtacgacatcgacggcgtcagccaggacacggtgatcgccgcccgagaactggatctggaaggcaacgacaaccgcaactgggtcaacgaccacaccgtgtatacgcatgggtacggtgtcgtggccgcatacggcaacaaggtggcggcggacgggcagccgcagttcttcgaatccagcatccccacccagggcaagctcaccgaatcgcagaagtacgagccgcgcatctacttctccccgaacgcccccgaatactcgattgtcggggctccgaagggcatggattcgtgggagttcgactatccgaccggatcgcagggcgcgaccaatacgtttgacggcgatggcggcccctcggtgggcaacatcttctcgcggcttttatacgcggtccggttcggatccgatcagatcctgttctccgaccgtgtcacctccgactcgcagatcctgtacgaccgttcccccaaggagcgcgtcgccaaggtcgccccgtacctgacgctggacggccgcgtgtacccggcggtggtggacggacgggtcaagtggatcgtcgacggctacaccacgtcggatgcctacccgtattcgcagatgaccgatctgggaagcgtcacgcaggattccaccaccaagacgtcgaacacgatccaggcgttgggttcgcagaaggccaactacatccgcaactcggtcaaggcgaccgtcgatgcgtacgatggctccgtcgaactgtacgcctgggatgccaacgatccggtgctcaaggcatgggagaagatcttccccggacagtaccacccgatctccgagatatccggcgacctgatgagccacctgcgttacccggagaacctgttcaaggtacagcgcgagctgctcgcgaaataccatgtgtcgtccgcaggccagttcttctccggcgaggatttctggcagacgccggtggatcccaccgaatcggccacggcgcagcagcagggcgttccgcagcccccgtattacctgtcattgcagaccggcgggtcgaagaagccggtgttctcgctgacctcctcgtacatccccgccggcacgtccacgcgagaaatcctcaccggcttcctgtcggtggattccgacgcgggcaacgaaaagggcgtaatcgggccgaactacggcacgatacgattgcaggagctgcccaaggactccaacgttcccggaccggggcaggcgcagaacaacttcaacgcgaacgcggacgtgtcgaaggagttgaacctgctcgaatccggttccaccaaggtcaaccgaggcaacctgctgacactgccgctgggtggcggtctggtgtatgtgcagccggtgtacgtgcagtccagcggatcgaccagcttcccgctgctcaagaaggtgctggtggcgttcggcgaccaggtcggattcgccgatacgctcgacgaggcgctcgaccaggtgttcggcggcaattcgggtgcgtccgcgggcgatgccgagaattccggcaacacgtctcaaagcggtgacgggcagaacagtggcgggcagaacggcactgaatccggtgatggcagcgagagcaacggcaacgcgaatggcagtggtacgaacgagggcaaggaccagaacggttcctcctcgcagggcggcagccaaagccccgagcttcagcaagcgctgaaggatgcggcccaagcgatgaaggactcccagtccgccatgaagaacggcgactggaccgcctacggtgaagcccagaagcaactggaagaagccctcaacaaggccatcgaactcgacggtggcaagtaagagccaaaccagaaaaccccagtactgtgaacgcccccacaccgggggctgtcatgcgcagcatgactggggtggttctcagcccagaacggcccccagtcatgctctacccatctgaccatctgattcgctcccagcccgtgtgccacaccaagcgaaaaacaccccaaaatcgcatggtgtggcacaacagagagccacaccatgcgatgtgagccttcacatcacgtggtgtggcaaagcacgggtcatgaaaaccgccattttccaatgatcggtggatgagcccggaatcacccttggccacaccagccccaaaaccctcaaaaatcgcatggtgtggtacaggcgagggctagatggcagtcggtcggtaaccatccccacaccttctcccgcggaagtcccatttgacagcgcgcaaatgggacttccgcgggagagaacctgactagtgggaaaggggaacctgactagcgggcggcgatgagatcgaatacgtgctcgactacgcgcgccgtgcaggagccgtgctcggggatggccacgttgcgacggatgaacgcctgataggcggcatggtcgaaatcgtcgtgctcgatggctctcacgatcgcctcggcatcatccgtgaacagcgtcgggatatcgcgcttcgggtcgatgtacaggctgcgtttcttcgaatagtccggccagtcgtacgcatagaggaacaccggcaggtcaagcagtccggcctcatagatcacggtcgaatagtcgctgatgacgtaatcggcgacgaacagcatgtcgtactggctcggatagtgctggaatacgtgcggattgttgatacgcaggtcgtccaacggatggcatttcacgatcaggttgtacttgtcgtaatcgatggcatcggcgagggctgctgccgcctgagtctgattggcgggcgtctttttgcggaacgtggggcagtagacgatgttgagcttgcgcccgagttccgggaactcgcggatgatgcgttcgcgctgctgcgcccggtacgagctgttgatcagcagatcggtgcggggcagtggcgcctcgtagatgatggacgggtcgatgtcgaagccgcgagcgtaatcgctgatgaacgatttggatgagatgagcacggacgtgtacccgcgatgcatgttcagcagcgaggcggtggagaacttccggccttccttggagcccaacgcggtgtatccgaacttcttcatgttgccgagcgcatgccacatctggatgacgggcacgtcgatgtagccggcgagcaggcttaccacgatggcgtaggtgtcgagcagcaccgcctggctggtggcgatgaaatacagctgccggatcatatggaacccgtatcgtaccgggttgtgcagcttcttggcgaggatcaccacggaataatccggatgcgtctgtctcacataatggcggatgagccggaaatcggtggtcggtcggtcgctctcgcgacttaggcacacaatcctacgcttgcgcgggaacgcgcggaagaacctatatgtaagaaacatcatcatccgaactgcattaatcagatgacgtttcattcttgttctcctttaccgaagcatcaggttggtgtgttagccggtctaccgtaactgcaactctatatattacataggttaccacaaggggaaccgaagatgaatgacaaggtgtcgtaaaggagcccggggatgtcactggatgttcaccaaatccgctggcggtcaagttacttggagattgactattcctcgcgggatggtggtgtgccgtggctgtattgcgtgggacgttgccagttcgttccgttcgagatcgtcgggcttgagagcggtgtccgccgcgcccgcctgaacctggtgctcggggacgggcgcgaggtgcttcccggcggccaatggatcatctgcgagaaaatcaaggagtcggcgctcgtcagtctgcaggcgctgtacgccgaatacccgctcatgccgcagcgcgtcgactacgatgtacgtcacctgctgcccccggagttgcgtgacgatgatgaggcggtcgcacagtacaccgacgaagagcgtctggaactggtggcccggcacccctatgtcaccagcggagtcacctacgacgatgaggtgctggagcggcttgacaatctcgaccgcgtgttccgctacggcaagaacagctacgcctatactggtgtgttcgtgcccaagacgaatcgcgccggtctcatctatctcgcgttgcacatgcagttcttccagcgcaacaagaccccgcgccaccgtcagcgcagccgtcgccagatgcagaaggacgttttcgcggcgacgtactcggtgatgaccaagctggtgccgcgcaagcgcaatcgaatcctcttcctcaaagagaacggcgagggtccgacggagaatatggaggcgttgcaaagccgcatgatcgagcgcggcatggacaagcgcttcgacattcgtgcccggtaccgcaacgtattcgcgggcaggcagaacatcgtcgcctggctgcgcgacctgttcgagatcgcccgaagccggtacgtcttcatcgacgattacacccctgtattcaacttcatcgaccccggtgaagatgtgacgctgacgcagatctggcatgccggcgtcggtttcaagtcggtcggctatgcccgttttggtctcaagggctcgccggatccgtacaattccgcgcaccgccgatacacgtacgcgctggtcggcaacgagcacctgcgtcgcatctattccgaggtgttcggcatcgaggaggaggcgctgctcgccacaggcatgcccaggctcgaccatttccttgatgagaaggtcgagaaggaataccgcgaggagatggccgacaagttcccgtggtcggccaagggacgcgtcatcgtgttcgctccgacgttccgcggcaccggtcagcgcaccgcgtattacccgtatgacgagatcgacatggatcgtctgtaccgcatgtgtgtcgagacggacacgtatttcgtgttcgagatgcatcatttcatccgcaagcgtccggatatctctgccgagtacgccgaccgcatcttcgacctgtccgatgagagcctgacgaagctgttcttcatcgccgatgtgctggtgaccgactattcgtcgtgcttctacgactacctgttgctcaagaagccggtagtgttcttcgtgcccgacaagaccgcgtactcgctgatccgcggtgtgcagcggtccatcgacgagatggcgccgggcgtggtgtgcgatacgttcgacgagttcctggacgtgctgaggactcgccattatgagacggtttcccctcacccctcgtccatcgaccgcgccgccgagcgcagcggactcgccagcgaccgtgccatcgacactattatctacggcaaggatgttccgggtgtgcgcaaacaggcctccggtaagggaggcgtggtgccggtccggcagtccgacaagtcggccaagtccgaaaggaaggcaaaggaactgctggattccaaggtcgccgacaaggataccaagtccgcctccgacgaggaggagtgagcgtgccggggaacacgagcatggccgtcgcgccagccgccggcgccggtgagccgggcagtggctccggcgagactgcccggcacgcggcaccacgcggcgccgggcgcccatcatacgagctgctgtccaaataccgcggcgtgctgatgggcgtgcagatcctgctgatcatggcgttccattacaccgaggacctgtcgaacgcggccgaccatttcaacggtcccgctcaggtgttctacgactatatcggcagttccggcgtcgacatgttcctgatgatctcggggctgggcctgtactactcgtggaagcgcaacccggacgcgggggcgttctaccgcaagcggctgacccgcgtgctggtgccgtacgtcgctgtggcgctggtcgggtggatctggttcgacttcgtccattcggatgccggagtggtgcgtttcctcgccgacatcgcattcgtcacgttcttcacggacggtgtgaagtggttctggtacatagcggtgtgcctgatctgctatgtgctgtttccgctcgtgttcgccgtcgtggacggtacccgaaacgtcgccgcggcatgggcgcgaacgttggcattgtgtgcggccgcggtgctggtcgcggtggcgctgtacaggttcgcgccgtctttctacgacaacgtcgatctgatcgtcaaccgcataccgtgcttcatcttcggcgcgctgctgggaaggctctcgcatgaacgtcgtccattgcccatgcccgtggtcgccgcatgcatgacggccgtggccgtcatgctctacccgatgcagctggttgatgtccctctggtcaaggtgtaccttcgcgcggcgttgaacctgctgttgtgcatatgcggcgtcgtcatcatggacgtgatggcccgcgcgggaaagcccgcgctcgcaggccttcacgacgtggtatcgaaagtgctgagctggttcggacggtattcgctggaactgtatctgcttcacgtgatgattcgcaagatgctgaacctcaacgacctgccgaccacgcacccgcgctatgaggccgtcgtgatcatcggcgcgatcgcgctgtcgatacccctgaaacgactgtgcaacctgattcagcacaggctgctgcgtgggaaacgtttacttaattccaaagagtacaggggcacatatgcagcttgatgcaccagcgggcgaaaatatggctgtattcgtttcacatgcctttgttctatatttgaaccctctgccggtacctcacgtgaatggcccgtttctgttcgggccgaaccgtttcttccgtgactacctagagggacgcaatatcgcatttgaggatcaagagttgcaggtggatttctcttccatgaatgagatgggaataacaatcatggaagaatggaacaagatatacatgggtgaggcgcaatcaaagttgtctgtcttcacagagaaagatgtacgctattacgccgatgactatgccgcctatgtgggccagatggtattgggttgcgagatcggcgccgagcgtattcttgaacaccctgacatcgaacgtttgaaaaccgagaacaagaaactatccgagaagcggaagaagctcgaagcggatctcaagaaatctcgcgccgaggtccagaaactccgtaactcgaagtcgtggaaggtcactgcgccactgcgggcggtcatgcgtctgtttggaaaggactgatggtggtccgtcttagtgcactctgcgtgccgaataccacagaaaggtgaatgctcggtaaataagtcgtgtctggaacatagactacgtatgagttaacggggctgcaagcccgaaagcgcatatacgagagggtatgaacatcgctgtcatttttgcgggcggcaccggccaacgcatgaattcgcgaaccaagcccaagcagtttctgctcgtgcacggcaaaccgatcatcatctacacgcttgaggcgttcgatcagcatcccgacatcgacgccatcgtcgtcgtatgcctgaaggaatacatcgacgttctcgaacagctcatcaccaagttcggcgtcggtaagatcgccgcgatcgtgccaggcggctcatccgggcaggagtcgatccgcaacggcgtcgacaaggcgaacagactgtatcccgcggattcggtcgtcatcgttcatgacggcgtcaggccgctgatcgaccagcagaccatcaccgactgcatcgtcagtgtgaagaagaacggcagcgccgtcaccgtcgtacccgccaccgagaccatcgtgcaaagcgaggacggcgtgatcaccaacatcatcgaccgcaaacagtgccagctcgcccgcgccccgcagtgcttccgcctcggcgagctgcatgacgcacaccacaaggccgtggaagaagggctcggcgacttcatcgactctgcgtccctcatgtcgtactacggccacaaactgtacgaggtggaaggcgccaactcgaacatcaagatcaccacgccatcggacttctacatcatgcgcgccatcatggacgcggaggaaagctcccagatcttcggtctgtgacacgaacacggaggacaacgaccatcatgtttgatctgcaagaggaatatgcgtcactggcgcagcatctcgacatcgactgggatgcgctcgccggccggcatgtgctcgtcaccggcgccacgggccttatcggctcgctgtgcgcccgcacgctgctggaacgcaaccgcttgacgggggcgggcatcatcgtggacgcgctggtgcgagacccggccaaggcacaggccatgctggggcagtacacggccgacgacgggctcgtgctgcatcagggatcgctcgaagatgtcgactcgctcgacctgccggcggactatgtcatccacaccgcctgtccgaccgcatcgtcgttcttcatgtcccatccggtcgagacgttctccgcgatcgtagacggcaccaggtcgatgctggaactggcgcgacgccgcggcgcggcctccttcgtctacgtctccagcatggagatctacggcatgggcaacaagcagcgcggcacggaacacctgcttgacgagagcgccgtcggctacatcgacccctgctcggtgcgcagctgctactccgaaggcaagcgcgccgccgaaaacctgtgcgtctcataccattccgaataccaggtgccggtcaaggccgtccgcctggcgcagaccttcggcccgggcatccctcgcgacgacgtccgcctgttcgcggcgctcgcacgcaacgccgtggccggcaaggacttcgtcatgaagacgaccggcgaaagcacacgaatgtactcatacaccgccgacgcggtgtccgccatcctcaccgtgctggtcgcgggggagaacggcgtctcgtacaacgtggccaatccctccacctactcgtcaatccgcgagatggccgatatggtgtaccgcgaattcggtacgggcgacgcgcgcgtcatcatcgacgtcgacccgaacgcgccctacccgccggagcaccacctgccactcgacgtgtcacgccttgaggcgctcggctggaggccgcaggtaggtctcgaagacatgtaccgcaagctcatcgcatacatgggctgacctcgcgggagaccgcacctgaccatgagaagacaagcagatttggaagaacattgtttgcaacactgaagcaagtcgtcggcgagaactggcattggcgacggcaggtctggaatctggcgaagatcgatctggtgaagacgtaccgcggtgccgcgctcggcaagatctggctgttcgccaaaccggccgtgtacatcctggttttctgggtggcactgaaattcggtctgcgcagctcgtccgacgtcaacggcaagcctttcctgctgtggctcgccgccggtgtgttcccatggttcttcatgtccgacatgattactaccggcagtgacgtataccgtcgatacccgtatctggtgaaccgcatcaaatttccgctgtcgctgatctccacgttctacacgctgtcgctgctcatcatcttcgcgtgcatgatggcgttcaccactgtggtggcgctgctcaccggcgtgcatcttggccgctacatgctgcaattgccgctggtcatggtgttcatgttcctgttctgggtggcgtggtccatggctttgtcgcctttgagcgcgatatcgcgcgatttctcgaacctgctcaagacgctcggcaccccgtttttctggctgtccggcatcctgttcgacatcagcggctggccgcgtaccgcccgtctggtagcgtccttcaacccggtcacatgggtcgtgcagtcggtgcgtgactgctttatctacaacaaatggttcttcacggattgggagtcgttcctgccgttcctgttcgtgctgatgatcttcgtcgtgctcgcgctgcacaactaccaccgtctgtacatggaggtgccggatgtcctctaagctcccatcgaatgtcacgcgaatgggcgatgccacggtcatccgcgacgaggacgcgagcaatcccgtcgccgtgcgcttcgaccacgtcaccaagcagtacaagctgttcaagaacgacaagctgcgcctgctgtccaccttctccaagcgcattccgcacgatacggtcaacgcgagcgacgacctgagtttcaccgtgaaccgcggcgaatccctggcgctgctcggcgacaacggcgccggcaagtccacggcgctcaagatgatcaccggcgtgtgcttcccgacgtccggcaccgtcgaggtgcacgggcgcgtgtccgcgctgctggagctttccgcgggcttcgacatgaagctgtcgggcatggagaacatcgacatgcgctgccagctgtggggtttgtcgaaagaggagtccaaggagctcattcccgagatcgtggagttctcggaactcggcaagtacatcgaccagccgatgcgcacgtattcgagcggtatgcgcgcccgtctgggcttcgcgttcgtgtcgtcgatccgtccggacatcctggtggtggacgaggcgctgtccgtcggcgaccgcaagttcgcgaagaagtgccgcgagcgggtcaacagcatcatcgccaacgagaacgtgaccgtgctgttcgtcacccactcgaccggcaccgcgaaggagttctgccacaggggcatcgtcatccagaagggcaaagccatgttcagcggtggcatcgaagaggccgtcgacttctacaccgcctcgtgacgcttcggccgtttcgctgacggcgttgccggcaagcggcacggccgacgtccattgaccgcgttcggtcggatggccgggacaactcccgcgtttcgtgattgtgcggccgttgtccacgtttctgtcggcggatcgaggcgaatcgcgcatcatgcaccgctgacaccagtctcacccgccctatcccgccggcagggcggttgttatgcttgaagacatgtcctataccatccgcgcggccgttgacgccgacgttccggccatcgccgacatctacaacgaggcggtgatccgtgggagagcgtccgccgaccttgaaccggtgtctctggaaagccgtcgtgcgtgggtcgactcccatcggccacgcgccaagtatccggtcgtcgtcatcgaaggtcccgaaggcgccgtcgtggggttcggctcgctttcgaaattccatcagcgggccggatacgacggcatcgccgaactgagctactacatcgccggcgaccaccaacgccagggactcggcaccatgatggtgcgatggctgatcgatgccgcggcagagcgcggattcacgcatgtcacggcgatcatctacgccgacaacgccggttccgtcgcgctcatgcggcggttcggattcatccggttcggactgcttcccgccgcggtgggcgcgctcgacggcaagctgcatgacatgagctattgggtcaaggcgttggcgggtggggtacaatccttaaggttgaagacaggagagtaacacatggcatccgatttctggctgatcgtggggctgggcaatcccggcaagaagtacgagggcacccgtcacaacatgggcttcatgaccgccgacatattggccgaacgctggtccgtcgccttttccgaccacaaggggctcgcgatgctcggcaagggcgcgatgaatctgcagggtcgcaacgtcaagttcttcctcgccaagccgctgacctacatgaacgactcgggcaacgcggtcgcctcgatcagcgcgtactatcagatccagccggatcacgtcgtcgtcatccatgacgacatggatctcgaattcggccgcataaaggtcaaggcgggcggatccgccggcgggcacaacggcatcaaatcaatcgacaaagccctgagcaccccgaagtacgcgcgcgtgcgcatgggcgtcggccacgctcagcgcggagcccacgcgcacgacaacaccgtcaactgggtgctcggcggtttcggacccgaccagcgcaagcagctgccggaattcctcgcagacggcgccgacgcggccgaaaccatcatcttcgacggactcgccgccacccaggagaagttcaatggccgctgagcagggacgcgcgcgcggcaaagcgtccgccgccacggccacacgcgtccagaacgcgctgatcgacggctccctgtgcggcatcctcgaacggctcgatgaggatccggcattccatcggctcgtcagcggcggcatgagcatcgccgacggcaaggacatcgccccgatcatcaccgtgggcaccccggacgggttgcgcccggccatcgccgcagcgcaggcggaacacacccccgtcgtcctggtcgtggcctccagccgcgaggccgaggacaccgtgaacgcgctgcggtcgtggtacggcggcgacccgaacgacatcgcacaactggaggcctgggagacgctgccccacgagcggctcagtccccgtgccgacaccgtggcgagccgcatggccgtattccgcaggctcacgcaccccagcgacaccaatccgatgttcgggccgatccgcatacttgtcatgccggtgcgttcgctgatccagcccgttgtcaaggggctcggcgacgtcgatccgctcgtcttcacgcaaggcgaggagctgcctctcgacgacgtgtcgcgccgactggttgagaacgcctacacgcgcgtcgacctggtgatggaccgtggcgagttcgcggtgcgcggcggcatcatcgacgtctttcctccaaccgcgccacatccggtgcgcatcgagttcttcggtgacgagatcgactccatccgagaattccacgcgtccgaccagcgcacctacggcgagggcgtccgcacgatctgggcgacaccctgccgggaactgcagctcaccgacgccgtgcgggaccgggcgaaacggctcatcgggcagattccgaatgccgacgacatgctggagtccatcgcgaacgcgattcccatcgaaggcatggaatccctgatgcccgcgctcatcgacgacatggaacccgtgaccggcatgctcgacaggcatgccgtcatcatgctcgccgacccggaaaagctgcgccgcgcggcggacgacctctcgaaaaccgcgaacgagttcctcgccgccagctggcatgtcgccgcggccgggcacggtgccggagctcccatcagcttcgaccaggccagcttcctcgactacgaggaaaccatcaactcgctcgcatactccagccacgacgtgtggagcctcaccagtttcggcgtggacgcctgccgcccgaaccacgtgcagctcgccgccggcaacccgggcgaataccgcggtgacgagacgaaggccgcggccggcatcgaggggctcatcgacgcggggtaccaggtcaccgtcaccgcggccgcgcagggcacgctcgcgcgattgaagcgagccatcaacgagaccggcatcgcctcgttcgacgtcatccgctcccaggccatcgacgggttcatcgacacggcggcgaagaccgcgctgctcaccgaacgcgacctgaccggacggtccagtgcggccggtcaggcgaagacccccaagcgccgccgcaaggcaatcgacctgatggagctcaaagccggagactacgtggtccatgagcagcacggcatcggccgtttcctggagatgcggcagcgcaccatcggcaccggggcgaacaagaccacgcgcgaataccttgtcatcgaatacgcgcccagcaagcgcggcgccccggccgacaagctgttcatccccaccgaccagctggatctgatcagcaaatacatcggcgcggaggcccccaagctcaacaagctcggcggctccgactgggccgcaaccaaggcgaaggcgcgcaagcacgtgcacgagatcgccgaggacctggtgaagctgtactctgccaggcagcgcaccaaggggttcgcgttcagccccgacacgccatggcagaaggagctggaggacgcgttcccgtatcaggagacgacggaccagctcaccaccatcgatgatgtcaagtccgacatggagaaaccagtgccgatggatcgcctcatctgcggcgacgtcggcttcggcaagaccgagatcgccgtgagagcagcgttcaaggccatacaggacggcaagcaggtggccgtcctcgtgccgactacgctgctcgtgcagcagcatcacgagacgttcaccgaacggtacgagggcttcccggtcaccgtcgcggccatgagccgcttccagacgaccaaggagatcaacgagaccatcgagggactggagacgggtggcgtcgacgtcgtcatcggcacccacaagctgctcaaccccaagatcaagttcaaggatctcggccttgtcatcatcgacgaggagcagcggttcggcgtcgagcacaaggagacgctcaaggcgctgcgcaccaatgtggacgtgctctcgctgtccgccacgcctatcccgcgcacgctggagatggcggtgaccggcatccgtgagatgtctacgctcgccaccccgcccgaggaccggcttcccgtgctcacctacgtgggcgcgtacgaggacgctcaggtcacggccgcggtccggcgcgaactgctgcgcggcggacaggtgttctacgtgcacaaccgcgtgcaggacatcgcgaagacggccgcgaagatccacgagctcgtccccgaggcgcgagtcggcatcgctcacggcaagatgggggagaagcagctcgacggcgtaatccgcgacttctggcatcgcgacatcgacgtgctcgtatgcacgacgatcatcgagaccggactcgacatctccaacgcgaacacgctgatcgtagaccacgccgaccggttcggcctctcccagctgcaccagctgcgcgggcgtgtcggccgcggccgcgaacgcgcgtacgcctacttcctgtacgacccgtccaagccgatgacccagcagtcgcacgaccgcctcgccaccatcgcgcagaacacggcgctcggaagcggcttcgacgtcgccatgaaggacctcgaactgcgcggcaccggcaacctgctgggcgacgaacagtccgggcacatcgagggcgtcggcttcgacctgtacgtgcgcatggtctcggaagccgtcgaacagtacaaggagccggagcggaccgagccggtcgcggtcaccatcgacctgcccatcgaagcgtccatcccggtggactacatcgattccgacaagctgcggctcgaagcataccggaaactggccgcttcgcgcaccgatgaggacctcaaggaactcgccgacgaactcacggatcgctacggcaaactgccggaggagttcgagacgctgttcggcgtggcccgcctgcgcatgaaggcgcgggaactcggcatatcggagatcgtcgcgcagggcaagaacgtgcgcgtcggcaagatcgacccgcccgaatcgatgcagatgcgcatcaaccgcatctaccgcggggcgcaataccggccggtcacgcacacatacctgatccccgcgccgttcgcgggcacgctcggcggcaaaccgatgccgggcgatcaggtcatggactgggtgagcgacctgctgcacgacttcgcatggaagccgcaaccgaggaaggcatgatgggctccggatccccgttcgaaggcatgcccggaggcatcggggagcagaacggcatgatccggctgccgtaccatcccctgacttcgctgatccggcatttcgacaatggccaggccctggcgctcctgcactcggggcggggcggacggtattcggtgctcggactgcacgcctaccatcggctcatgcaatacggcgatgacgtgatggaaggcaccctcgccgtctgcggagacgacgatgtctggcgggaccggctgctccccggccaagacgcgctcatgctgctgcacgaccggctgcgtgacgagcccggcgtgctcggattcatgtcatatgatgacggccgacgccgggaaggcgtgcgatcccggttcgacggcggcccgcaggcggcagagcgaaagacgccgccggacgccgcatggtggagtttcgacgacatcctcatcgaagaccggcagcggcgctcgctgaccctgctcagccatcatcgccacccgaacagcgcccggaacatcgccgccatacgatccgtctgccagtccgcccccgctggcgggggctgtcgcgaagcgactgaggatggttatccagactccccgcacacttcagcctcccaccgcggcgcatggcgctgcgaccacgatcgcgcctcatactgcgaggccgtggaacgactcaaatcgcacatgcacgacggcgaagcctacgtagtgaactactcgttgcgtctcgacgtcaccagtcccgtgacgcccctggacatgttcctgcgtctgaacgacgacaatcccgcgccgttctccgcgtatgtcaacggcggcggatggcagatcgtcagctcgtcgccggaacggttcctcgaatgccgcagcggccatgtcgtcacccgccccatcaaaggaacgcggccacgtggcctcaccgtgcaggaggacgcggccaaccgcgccgcccttgagcaatccggcaaggaccatgatgagctgctcatggtcaccgacctcgaacgcaatgatctgagccgcgcggcgactcccggaaccgtgcaggtcacggggttcgccgaactggagacacacccgcacgtgttccatctggtgtccaccgtcgaggccgaattgcccgatgcccgcgatctgtccgaactgcttgccgtcatgtcgccgggcggatcgatcacgggggctcccaagcgccgcgtcatgcaactcatcgaccggtatgaacggtcgcctcgcggcgtgtacaccggctctctcggctacatcaccgccgatggcgactgcgatctgagcattctgatccgctgcgcgacgcacgtcgggcgatgtgacaaggctggcctgtaccggatcggcgcgggcggcggcatcaccatcgaatccgacccggacgccgaatacgacgaggccatgcagaaagcacaggcgctgctcgacgcgctggactgtgacgtgtcggacagtgacgtgcatgacggaagacaaggacaatggcatgactaatagcaatggcacgcctggcggcgaaggcacggccgtcacattcgctctggatgagggataccagttcggcctcggcgtattcgagaccatcaacctgaccggcgggcgactcgtcatgctcgaccgtcatctcgaccggcttcggcgcggagcgcgggcattggatatcgacgcgccggacgatgatacgctgcgggctcatatcgccgaacatctcgacgcggcagaattgcctgacggtcggtcgttcgcggtcaagctcatggtgtcgtccgcgaacgtcatcgtcacgcatcggccgaacccgtatgcggattgggcgcaggaccgcggtctcaggcttggctggtgccgcgcctggcgcaacgagtgttcgccgctcacggcgcacaagacgctgaatcagggcgacaacatactcgaatcgcgttcggctcggcggctcggcttcgattccgccgtgtacctcaacacgcgcggcgacatctgcgagaccaccaacgcgaacctgttcttcgtgcgcgacgggcggctgtacacgccggacgagcgatgcgggctgctacccggcaccgtgcgggcgtggctgtgcgaacgatacgaggccgagcaggggaccttccgacaggattcgctggacagctgggatgaggtcttcgccaccaacgccctgatgggcgtgcgcccggtcgtcgagctgggggatgcgggttatggaatcgggccggtgacgcgggcgatccagcgcgaataccgtcggcttgagctcggtatcctctgaccgccctcagtcggctccgccgccagtcttcgacagtggcggcggagccgactgagggcggtcagatgtacggaatctgtctatatccagccgaatgttagcgctcatattatttttccgagaaattctggcactcgtccacaaaaggcattattcttaagtctgtcatcacaacctaacagtcttaaggagtagttgtggcagctattgaaagcgtttacgcgcgtcagatccttgattcccgtggcaacccgaccgttgaggtcatcctcgacaccgaagacggcgccgaaggccgcggcctggttccgtccggcgcttccaccggtgaggccgaggcttgggagcgccgcgatggcgacaagtccgtctacggcggcaagggtgttctgaacgcggtcaaggccgtgaacgaggtcatcgctccgaaggtcatcggcatggatgccaccgaccagcgcgccctcgacgacctgatgatcgagctcgacggcaccccgaacaagggcaagctgggcgccaacgccatcctcggcgtctccctggccgccctgtacgcctccgccgagtccgccgaactgccgctgtaccgctacatcggcggcaccaacggccacatcctgccggtcccgaacatgaacatcatgaacggcggcgcccacgccgacttcgccaccgacatccaggagtacatgatctccccgtacggcttcgacacctacagcgaggccctgcgcgccggcgtcgaggtctaccacaccctcaagaacgtcctgaagaaggaaggcctgaacaccggcctcggcgacgaaggcggcttcgccccgaagatgaagtccaacgaggactccctcaagtacatcatggacgccatctccgccgccggctacgagcccggcaagcagatcggcatctgcctcgacgtcgcctcctccgagttctacaacaaggagaccggcaagtaccgcttcgacggcgaagagcgcgactccgcctacatgctcgactactacgagaacctcatcaacgagtacccgatcgtctccattgaggatccgttcaacgaggaaggctgggaagactgggccgagatcacccgtcgcctcggcgaccgcctgcagttcgtcggcgacgacctgctggtcaccaacccggcccgtctgcgcaaggccatcgacatgggtgccgcgaactccctgctggtcaagctgaaccagatcggttccgtcaccgagaccctcgacgccatcgagctggccaccgagaacggctacacctccatggtctcccaccgctccggtgagaccccggacaccaccatctccgacctcgcggttgccaagaacacccgccagatcaagaccggtgccccggcccgtggcgagcgcgtcgccaagtacaaccgcctgctggagatcgaggaggagctcggctccaccgctcagtacgccggctacagcgccttcaaggcctgcaagaagtacatcgccaagtgattgtcgcggccgtaaggccgagacgatgctagcgtcgtgacaatgcccggcatattcgccaagtcgaatgtgccgggtatttttgttgccatgaacgactcgacccggaacatgcgaccacgcggcaaacgaagcaaacggcacggcaccggaccgatcgcgttcttcgtgtcgctgttcatcatcgcgctcggagccatccaactggtctccacgttccacacgtacgcgctgaacctcgcccagctcaacgacctcaagaatcaggaagccgcgcttgtcaccaagaagcaggatctcgaaaacgacatcgaacgctggaacgatgacagctatgtggcgacgcaggcgagggagcggctcggcttcgtcttccccggtgagaaggcggtgcgcgtgcagcacccggaagcggtgacgggcacaagcgaggggaccgcgaagaccaaaagcggtacatccgacgggaaggtgctgccctggtacagcgagctcgaatattcgttcaagaaagccgatgagcggccatcgaaaacggcctccggcagccaatcgggcgataccggcaaagccgacggcaactccggcagcgcaaccgacacgaactcgggcgacaagcagtagacgcggccggcggcagcgtcattcatccgactgcataagccattcgaccagttattcgataagccattcgataaggagccaagctggtgaccgaaccagaatcacaagacgaatccaccacacgagatgtcgcgaaactcgccgaccgattcctgcagcagcgtgcagatgagcgtgacatcgccatcgtcgaacggcagctcggacgatacccgcgcggcatggtggcggtcggcgcccgctgcgcatgcggccggccgctcgccgtggtcacccggcccatgctgcccggcggcataccgttccccaccacctgctatctgaccagccccgaggcggtgaaggcggtgtcgcacatagaagcggaaggccgcatgcgggcgtacaacgagctgctgcacgacgatgagacggtggccggcgagtaccgcggggcgcaccgcctgtacgtggcgttccgccatgagctggcggtgcggctcggcgatgacgaaagccgcatcgccaacgtcagcgcggggggcatgcccgaacgcgtgaaatgcctgcatgcgctgctggctcagaccctggtcatggggaagggcgtcaaccccatcggcgatcgtgtgctggaggcggtgacggaggagttcagtccatccgtctgccggtgcggttcgctcgatgactgagcggacagacgaaaaaccgaacggccaaaagactggaaacggccgctgaacgcaatgattgcaccgagcgagacgatcatgccgggcgaacgcccccgatgatcgcggtcgcccggccggcgagacagcgggaaataaaggagatagagatgaaatccgttaccgttgcgggcatcgactgcggcacgaactcgatccgtctgaagattgcgcgtgtggacgatcagggcatgcacgagatcgtgccgaggatcctgcgcgtgattcgcttgggacaagacgtggacaagacgcaccggttcgctcaggacgcgcttgaccgggcgtacacggccgccgcggaattcgccggggtccttgcccagcacccggtggacgcgatccgattcgtagccacatcggcgacccgcgatgccgtcaaccgtgacacattcgaggatggcatcgagcagatactcggcgtgcgccccgaagtcatcccgggaacggaggaggccgatctgagcttcctcggggcgaccagcgtcgtgagccgcggcgagctcgaacccccgtatctggtggtggacctgggcggcggctccacagaacttgtgctgggcggcgacggcatcgacgcgccctccacgcaggtacaggccgcgttctcgatggacattggatccgtgcgcatgaccgagcgccacctgcgccacgatcctcccagcgaaaccgaaatcgccgaagcgatcgcggacatcgacgagcacatcgacgaggcgttccgcacggtgccggcgggacgcacccgcacgatcatcggcgtgtccggcacggtgaccacgatgagcgcgctggctctggggctcaaggaatacgatcaccgacgcgtggacggcgtgcgcatccccgtggacgacgcctacgccgtggacgacaggtttctgcgcatgacgcgtgagcagcgccgcgcctacaagaccatccatccgggacgtatcgacgtggtgggcggcggtgccgtcgtatggaaccgtgtgctcgcgaaggtggcccaggcggccgcggccgatcatggcggagtcatcgactcgtatgtggccagcgaacatggcctgctcgacggcatcgtgctcgactgcggacggcggttgcttgcagaacgctgaacaagcatgacataatggctctgccggcatatttgccggcacagcccccgtggcggaatcggtagacgcagcggacttaaaatccgtcgcttttggcttgtgggttcgagtcccaccgggggcaccttatcgcaacattctgggatggctgctttacatacagctgggtttgcggcccgacactgacgaaaggtgcaagatggcgaactggacgaacgtgacgcgcgagcccgagaccgggttgccgacgatgctggtgcaggcggtctccatcgcctttgtcatgtgcgtgtgcgagctggtcagcgcgccggtgatggtgagcgccgcgggaggcgcgttcgccctgatgccgtggttcctcgtggcctgcctgttcgccgtcgcattcgtgtatacggtcggattcgtgctgctgtgggcggctgattcgttcgccgcccggctgaaacgccgcgatgcgctgatgccgctgatatatgccgtgatcggatgcgtcgggttcggcatctgggggtattgcgtgtatccggcgacgatgaactcgatcatcacccgagccggtctggccaccctttcgcagggcgactcgctgatgatcggcatcaactgcgccgtggtgggcctcgccgcgttcttcctgggaaccgccgccatgccgcgcgtcatgaagtccaagggcaggatcgccgtcacggccgcagccgtcatcgcgctcgccgtgttcggcggcgtcgtcctggcgatgacgtggtcgcatctggcgtgagaccagccattgcggaacgctgtcgtcgagctgacctgattcggcggttcggcggggcagcagggcagcggagatggcgacggcccggccgcgcgcatgtgcgtggcggaggatatgatatcgcgatggtatcagccgtgaaagcgtgcataacagtgtgaagggattcgtcagtcatgttcagtgttctcgacatgttcaccatcggtgtgggccccagctcgtcgcacaccgtcggcccgatgtgcgcggcgcaggcgttcgcctcgtcactggaggaatctggcgccgtgtcgcgcgtcggccgtatccgcgtcgtcctgtacgggtcactgtcgctgaccggactcggccacggcaccgaccgcgcgattctcgccggattggaaggcaacgtacccgccacagttgatacggattacctgctttcagtccgagaacgctgcgcgcacgacggaaccatccatgtcaacggcacgaacgccatcgcatacgatgacgacggcgacatggtcttcgaccggtggaagcggctcgccccgcatcccaatggcatgcggttccaggcgttcgacgcccagggcaacatcatcgacgagcaggtctggtattcgataggcggagggttcatccgccgcggacggatcgacgacgcgctgatctcgaaccacgagcagacgccggcgtcgtcgcagccaccgaaggactccggtaacgacgagacggccgaatacggcgacggcgtgccataccccttcgtatcatgcgatggcctgatcgacctgtgtcggaagcaccatctgagcatcgccgacgtcgtctgggcgaacgaaacggcccggcgctcgccgcaggaggtgcgtgaccggctcacgcgaatctggaacgtgatgagccactgtatcgacgccgggtgcgccagcgcgacgccgacgctgccgggaggtctggacgtgccccgccgcgccccgatgatgtaccggcgtctcgcggccaacagcgacgtgctcagacgcgaccgccgcatctcttcggcgctggaatcctccgattccgcatgggtggcgttgttcgccatgtcggtgagcgaggagaacgccggcggcggccgggtcgtcaccgcgcctaccaacggttcggccggcatcattccggccgtgctggaatactactggcactttgtcgagtccgccgacgacgagggcgtcaggacgttcctgctgaccgccggcgcggtcggatacctgttcaagcgcaacgcctcgatctccggagcggaagtgggatgccaaggtgaggtcggcgtcgcctgctcgatggcggccgccggtctggccgcagtgatgggcggcactccggagcaggtggagaacgcggcggagatcggcatcgagcacaatctcggcctcacctgcgatccggtgggcgggctggtgcagattccgtgcatcgagcgcaacgcgatggccgcgaacaccgcgatcaacgccgtgcgcatggccatgctcggagacggctcccacatcgtcagcctggatcaggccatcgccacgatgaagcagaccggcgaggacatgatgtcgaaatacaaggagacctcgaagggcggtctggcggtcaacgtcgtcgaatgctaggccgtcgccgtgccgaatatggcgaatatggcgatttgcgttgaaaaatacgctgcgagctgtgcaaccggggcttggggtgctagtgtgagtggcactgtctttttacgacttgcggccatgccatgaacggcatggcattattgataggaggtaggccatggcgaacatgcctgaggtcaatgccgtgtttggcgcggctccggagatcgctttcccgtcggacgaggcgccgaagggattgaaggccgtggagatcgtcgagggtgacgggccgatggtccgccgcggcgacacggtgaccgtgaactatcacggtgtggtctggggcaaggacacgcccttcgattcgagcttcgcccgccaccagccggcaagcttcggcatcggcgtcggtcaggtgattcgcggctgggatcagaccgttcccggccacaacgtcggctcccgtctggtcgtgtcgattccgccggagtatggctatggcagccagggcatgccggcggccggcatcggcggcggcgacacgctcgtattcgtcatcgacatcatctcgacccgctgaccgtatgatggcggtcatctgacgcatcgattggatatcactgatacaggaggaacccatgggtgaggaaaaatccgttctgctgacgcaggaggctttcgacacgctgaaggatgagctggcgcatcgacagggccagtaccgcgaggaaatcaccaagcgcatcgcggcagcccgcgccgagggcgatttgtcggagaacggcggttaccaggccgcgcgcgaggagcaggcgaagaacgagggccgcatcaacgagctcaccgtcaagctgcgcaacgccaccatcgtcgaagctcccaaggccggcaaggtcggcaacgggtcgctggtgacgctggagctcgccggccgcgagatgacgtatgcgctgggctcgcgcgacatcaaggtcgcgacgaagtacgacgtgatcagccccgagtctcccatcggcgccgccattctgggcgccaacgagggagatacggtgagctacaaggcccccaacggccgtgagatttccgtcgtcatcaaggaagcgaagcctctgagctgaccatatgcgcgtcctcgctgaccggggactggtgattgttgcgccatcagggtcgacatgactcacttcgggctgtacggttttatgccgtgcagccctttccaataagaactacgttgtcagagccgtctcacgtgactatcattgaaccataggttgttgtgttggcctatatatcgcagatgccaattcaatggagaagacatgaatgggaaaatgctctctgccgtcggcaaccgttataagtacgttgtcgccgagcttcctcccatctcaggcaatggctgcctcctgtcttacgcgcggtatgggatgtgtgtgactaaaactccatacagtgcgaatttctgacatagcttatgtgaggagttgtttctgatgagacgttcaacgaagatttcaatcggcgttacgacggtggttatcgtagttgctgctgtcatctgatgatggtacgtacacgcccatcaatcccgccagcggcatgctcggagtcggtggacagcaggtcgctgctctctcatccgacggacgatccgccactggcgccacgcttcaggcctatgccgaggctgtggactagaaaagcgtttctaagtgcgcgccgaaacgatgagcgtgcgcacataggcacgcaaatggcccggtttgcgttcttaagtgcgcacggttgtcgtttcgacgcgcacttaggaacgctctagtgcgttgtatagcggtctcgattttgtttcgaccatcacgtgttacgacgagtgaaggcgatgttcgttgtgggctggtggccttcttcagactcgctccgcgagctggaccgaggacgtccgcaccacgaccggcaaccgcagtttcatggaagagctggccgagtgctcttggaatatgtaagcgtcttcgtgaaagcggaatggtctagggcgtcaattccgcctagagatctccgcccaatctcgtctctttatcggaacagcaaacacggtccatgattgacatgggcgttgacgctgattcatgaggggagtattctagatattacgacagacagttgtctggtaatgtccaaagggggactgtatgaatatcaaaaacaaaaataatggcgatatcgattgccagtatgttggcgctgtctccgttggggatggcgtctgcacatgagacaaccgtcagcgtcgcagacgatgccgcagcaaccacagtagaaccgcggtatggcgagaaaacgacaatgacgttgatatccaccgcgaaaaaaccggcgttaccggttattgcctgcagccgcctagtgctgctcattactatcaggcacgcatcaccaagaattacaccatcaaacattatcgtgttgactactacgagtacggagtcaagaagcgaactttttatcaggacatgtatgagcaggtacctgaagctccatatcttgtctgcgtctcataagttcgcatatcgaagggaatcatcgtgaacacgacgcgtaataaactgctgaactggtatccgatcatggcggtgctggtgctgattgtattcgtgggcggagcctggctctgggcgtaccgcacgactccaagcgcctccgcaatcaccggcgagctcaacgcgattcctgtcaatgtgaccagcgaacagctgatccgtgacggatacattgatctcaccaaagtaggagaatcctccaacgtcgcggtgaatgagtttcttgccgaagcgaaacagcaggaagcccccgtactgaaatacatcaacatggagaaggagagcctcacggctcacgtcctgtggtatgacccatatgattcgaccccttgggccaaagccaaggatggttcggtcgtgatctaccacaaccagaccgggcgaatccgcgcatgggcgtggcgcaacggtgagattgtccaaaacggtgaacgctacagctccaaagcggtgacggtcacgaaggacggagtcaacaccatgcttctgccgtggcggccggctgcgcccgatgtggtcccggaagatgacgacggggcatcatcgttggcgctgtattcgtatcgttcgtgattgcatagcagcattccaccggttctgcgggggcatgggcgcatgtctttgtcgtgcatgcccccgcgcggccattccacggatggcggcgtgatgacgtcttatttggtgtccatggtcggggcatcacctgatgtgcggtgcgccgtcggtgccgcgctccaggtctatgctgaggctgtggactagaaaagcgtttctaagtgcgcgccgaaacgatgagtgcgcgcacataggcacgcaaatggcccggtttgcgttcttaagtgcgcaggattgtcgtttcggcgcgcacttaggaacgctttcatgtgttacttggcggtttgcggggggggaagtctgattactgcggattatagcgggtgatgatggtcgctgtagcctggtaaccaccctcagtctcgctttgcgcgccagctcccgccagcgggagcataagttgtgtggtgctcgctggcgggctgacctgagcggcgatggtcacggccagagatgcacgatcaccatgtagatcgcgaccatgtggcaggcgtagccggcgacggtgccacagtggaagatctcatggaatccgaagacgcgtggccacgggtcaggcttgcgcagcgcgtagacgatggcgccgaggatgtagcaggcgcctcccgaggccagcagcaccacgacggcagggccggcggcgggggagacccagaagaagtacatgaacgccacgccggagactccgaacacgatgtagacgacggtatacagccagcgcggggcgctgatccagatcacatggatgatgagcgccaccagcgtgcagctccatatgccggcgatgatggcgttacgcatatgcggggcgagcgcgaacgacaccggcgtatatgtgcccgcgatgagcaggaagatgttcacgtggtcgatgcgccgcagcacgtcggtcacgcggggcgaccagtcgccgaggtggtaggcggctgagttgccaaacaggatcagcgagcaggtcatgaacaccgcgcaagcccatttcagtggcgcgccgtgggccaggcatatcaggacgatgccggcggcgagcgacagtggcgtggcgattgcgtgaatccaccctctcatcaatggcttgggccgtccgtgcacgtcgagacggatcttgcgctccacttccgccggggcgattccctcgatgcgcgcggcgtgggcctcgcccttggcgagggtcctggtggctttttcctcggccttatgtcggatcgcctcggccttcgctcgggatttcgccctcaccgcgtcggccttcgcctgcaatgcgacttcccgcgccttgatgacagcggctcgcttcgctgccaccgtcgcgtcgtcctgtactgccatatgacctccccgattggttacggaaacgtaacttacgttagcgtaggttatagacttgtccactcacggatgtgctcatgaagtactgatgacgattgcgtcatgcatcggcatggtattgcgtatcatggtactcatggctgatttcacacacattctggctactcgacctgacttcaccgaaagcgatcgcgaatggctgcaccatctggtcgccgactggcaggtgatcgccgatctgagcttcgccgacctgctgctgatcgtgcaggacggcgacggcaactaccgcatcgtcgagcagtgcaggccctccaccgtgatgaccctgagaatcgatgacgccgtcggcgcgctggtcgccccggaaatggtgggggagctggatgccgccatgcagtcgaagaccgtgttcaggtccactgtgctcagggcggtcggcaaatccacggtctgcaacgtgtacgctcccgtccgtcatgacggcaagacgctggggcttgtcgtgcgtgagaccaacatggccacgcgcgagtcgaacggccggtacgagtccgaaagcatcaacgcgggcaagcagttgtacgagatgattccccgtggccagttcccctacgtcaacgcgatcatgagccagcgccatgtcgcgcgtgtctcggacggcttcatcatgctcacgcaggagggcatcgtacgctacgcctcgcccaacgctatcagctgcttcagaaggctgggatgcctgatgacgatgcaggggcatttcctcagcgaaatcggcaccgacttgctgcgtcgcaacgatccagtccccgaggcgctgccgatggtgctgatgggcaaggatgcagtggattccgaaatcaacgccaaccgatccgcggtatccgtccggtcgctgcccctgtacgacaataacgggcgcaccggggcgatcatcctgtgccgtgacgtcaccgagctgcgcaggcgtgaggtcgaactgcagaccaagaacgccacgatctcggagatccaccatcgtgtcaagaacaacctgcaggcggtctctgcgctgctcaggctccaggcgcgcaagacgaagtccagtgaggtcaaaaaagagcttgaagaggcacagcgccgcgtgcagaccatcgccatggtgcacgagggactgagccagaccgccgatgagatcgtcgatttcgacaaggtcatctccaacctgctgaagatgagcgtcgacttggccacgatgtgcgaccagcacatccacatcgattacgtcggcaaattcggcatgatgcccgcacaggatgcgaccccactgtcactggtgctcaccgagctcatcaccaactgtgtggagcatggtttcgagggacgcaaggaggggcatatcaccatctccgccgggcgcagcggcaacagcctcaatgtcgtggtggaggatgacgggtcggggctcgccaacgaggaacacgacggtctggcacgctcctcgggctccggattgggcacacagatcatcaacacgttcgtcaccaacgatttcggcggcagcgtgcgctgggagccgcgtcacgaaggcggcacccgggtcatcctcgacatgacgctgcgtgcggcgcagaacgagtgacggtcgcttgacggcccgaaaacctgccgaaacatgattgaagggtggcctccctgtgggggagaccacccttttcgtagcatatggagctatgaatcggctgcggcgaggagtcggttgtgacgaggagcgactcagacctgcagctgcatggcctgggagcgacgcgctcgcatcgcgcgacgcttcagggcgcggcgttcgtcttcgctcagaccgccccagacaccataatcctgattggtgtccaacgcgcacttcagacaggcgtcaatcaccttgcaggtgcggcagaccgccttagcttcctcgatctgctggtatgcggctcccgtgtttcccaccgggaaaaacagttccgggtccttgtctcgacatgctgccttggcacgccaatcaaaagcgctgctcatgtgtatcaccctcctcccatcgcctattgccgacgacgagctttcaagtcatacattaggtaaccacgaaacgaatgttttttcaagaggttttcgctctcaagtgtgaagaacttcagattttggccatggcgcactgtatccacagggcgttcccttcgcgcagcagcacggcgcggcccgccgtcatgatgtcatccggcccgcattgcgacagcaggccggcgggtatgccatccatcaggtccacggtacgttcccccgtggggaagactattctcgtgccgcaatgctcggggatgcggatgtgcttggaggtctccacggcgaacacgacggtgacgtcgtggtcgcccagcgcgtccttgagccgtgcgcatagcgggtccgtgccgaacggatcgaacagtgtgtcggcatcgtccaccagccacagcagatgcggggatacgggaggtggcgattcggaggagaaccgcacccgtctgtgatggcgtaccgtcgacgtgacgaacgcccgtccctcgcggcgtgtccagcgcacgcacaggccgagaatgtcgcgtgaacggtgcgctagcaaggcgagaatcgtggacttgccgcgtcctgcgcttccgatgattccgacattgccggcgttcacggcgagttccgccacatcgatgccgatgccgtcatcggcaagggcgaagggcactgagggaacgtccgatgaccgtgcgggcagcatgtcggcctccacgatgcggggcagcggggccgtgaacagcgccgaggcatgggccagaccatggaatgccgcagctgtgcgcgcggcctcgaccatagcgccgatgtccgatacaaaggcgcatcggaacggctccacggattcaccgtcgttgcgccatgcgcacccgggagcggacgggctgatggatgccgcccgcccgtctcccagcaattcgatggattgcaggccgtcccggacacgcaggcatatgttcagcgccatgttcgctttcatgtcggcgctgacctgtcccagcgggttctgcgtacaggcgatgacatgcatgcccagggaacgccccagcgaggcgatgcgcaccagccggtccacatagtcgggcagctggttgttcagcgcatggaactcgtcgatgacgacgatcagcgagggtggcggggattgcaactgcccgatcgagccgacacgctccgcggcgaccagatgctccctgcgtcgcagctccagctccagcgccctcaacgcgcgaacggcgtgattcagatcgaggtcgcacacgctgcccacggtatgcggcagccgctcgatgacgctgaacgccgaacctcccttgaaatccaggaacacgaaatgcagccggtcgggcggattgcgcaccgccatggccaggcaccagctttgcaacagcacggatttgccggagcccgtggtgccggcgaccaaggcgtgcggcccttggcggggcagatcgatcgtgaacggccgctgccccgaccccatgcccacggtgacgcacagcgacggggaggcgagccatgttctcgcgatgatgcgccatggcagcggctcggcctgaagccccgtcagctcctccagtgagggcgagtgaatccgtgacggatcctccgactcgccttcatccttgtctcgatcggctccgtccgccgatccatgatggcggccccgggctcctgccatatcggtgggccgacttgggcggccgcccgcagcgtcgtggctcgtcgtcccggattcgtcgcggcgtgacgatccacgacggtcagcaagggatgacgccgccgaagccatgcatcccaccatgcccggcgcgaccatggcggcgaacagccaacgtcgctccagcagaagcatgatgaccatcaacgcctgtgcggcgatgggcgcgaccagcgtgatcatcggcagagcggacgatccgcgcgcgcgtcgctcgcgcctgggacgccgcctgcctcggccgcgccgcccgcgcctcgaatccgggttcctgccttcgtccatgccctcagtgtggaacggcgtcgccggtatgcgcaagcttgggggaacaatgtggtcgaaggctaccgagttatccacatttcggcgtgtcgtggccggcgggtggaacacgccaaccggccacgacgaggaatgcggcctgccgcatcattctgcgatcactggttggccagcgtgcccacggcgcccggcttgtggctgcccgaagcgagctctctgaacagttcgaggttcttcgcgtcatccagcagcaccgacgagccgaccccggacacgttgtagccgggattcgtccaatagacgctgccgctgatgccgttgtcggaggtggcgtcgcggaacgcgaacaccatctgtgcgagcgtgtacgggttcgtcttggaatcgacggtgatggacgccaaagcggctttcagcgtcttgttgagtttcgggatgttggtcagcgtcttgccggacatggccttcttcgcgatggctccgatgacctgccgctggcgttcggcgcggccgaaatcgcccttcgggtcggagtagcgcatgcgcgagaacgccagggcggtcgccccatcggccgtgtggcatcccgcggtccagttgagattggacagggcgtcgttcacggtctggtcatagcacaggtcgaccccgcccaacgcgtcgaccacatccttcaatccgttgaacttgatctgcgcgacgtggtcgatcttctggccggtgatggtctcgacctgctggacgagcgccttctcgccggacagctgcgcgacggcgttgatcttcatataggtgccgttcacctgcaccagcgaatcgcgcgggatggagatgagcgagcgggtgccggaattgggcttggtcagcacaaggatcgtgtcggtgcggaacccggtgatcgtcttcgcctcttcgccggtgcgctggtcggatccgaggatgagccagctggtgcctgacgtgttggccttgtcggacagccagggctgcttgtcgagatgaccgtcgacccagttccacagtccgaacgtcaccagcatgatgacgaccagcagcgccgccaaaacacttgcgacgatacgtcccacggggcgctttctgcgcatggcggtggctgccggcctcccggacatgccacggccgcctccctgtgcggccggcatgccgtaaccgtaagggctctgcgggccctgacgttgtgcggaggcgaacatcgactgcgcacccgcgccctcgcccggacgaggctggttcgaaatagtatgcgtggagcccgctgcacggcggggctggcgtcgggccgcagaagcggcgtcctgcatgggagagaccggttgcaggcgggcgtcctgctcggatgcggaccgcctggtcgacccggatacgcgacgcgatgaattcggcgtgaaactgggaatcacgtcctgtgcggccggcatgctttgcgctccctgagcgcctgccgaggtctgccgacgcgacggcacgcctgcctgcggaccggctccgggcacggcctcgccggcggctgacggacgcggcacctgcccgctggggcgacgcttgcgcgtgccggagggaatgaagctgggaggattgtcctgtgggctgactccactgtttccttcgctcatggttcctccagtgcctcgtgttctcaatcccttttacacgttgtcatgagtcattgtcgtgtccgttgcccattcctctgcagtaacggcacatacgtgaagggctggtggtcggatatgacagggaatgaagaaggcatgggggtgaaggctgatgtcgcttaccacactttcgcccttctgcgctgcattgacacggggtagacttgacaaaggtaagtcgcatgtgtgtaattaccctgatggacgtccatagcagcatcggcaaggaggagcgacacatgtggggagtggtcgacgattccgccgaggatccgatgagtgagctgtggggcctgttcaagtcggacgacgatgtttcctggcagcataaggccctgtgctcccagaccgatccggaagcttttttccccgaaaaaggcgggtcgacgcgtgatgcgaaacaggtgtgcgcccgctgcgaggtgcgcgagcaatgcctgcaatgggccatcgaacacgatgagcgtttcggtatctggggcggcctgagcgaacgcgaacgccgccgctataagaaggaacacaaggaacgtgcgtgacgcggcggccgtgcgtcgcatagactggagattatgagttccacaggcaatagcgatattcagcggattctggccgatgtcatggcgaacaggccatattcgcatcggcagaatgtcgatccgaccgtcgtggcggtggtgaccgttgaagaggacatgcggtttctccccgacaccatgggggcgctgctcagacagacggtgctgccgggcgtgatcgtcatcgccgattgcgccggcggcgacaatcctccggtgcaatcgcagttccaggtcattcctgcgccgtcgggactggtcagctccgttccgcagcccaagaccgtcacggtcgagctggtcggcgtcaagggcgcccgttcgttctatcacggcgttgccaaggcgctgcatgacgcgcaactcgactcgtccacccgcgcggtctggctgttgcatgacgattcacggcccgcggacgacacatgcctcgaatcattgctggagacgtggcgtaacgatccgaccgcatcggtgctgggagccaagcagctggactggcaggccgaacacctgcatgacgtcggcgcgtatgcgtaccggcatcgcgtggagtcgctggtggtcgacggcgaaccggatcaggagcagtatgacggccgtcgtgacgtgttctcggtgagcctcgcgggcgcgctcgtctcgatcgagaccatgcacgagcttggcggtgccgacgactggttcaccacattcgccgaatcggaggatttctgccggcgcgtatgcctgagcggccggcgcgtcgtggtggtgccccaggcgcgtatcgctcatcggcgggcgcgattcgaaggggtgcgtaccaagggcggcgagcccgtggacgaggatcgtcccattgacagttcgatggctcgcatcagggggaggatgcgctactcctatacggacacgcgcctgatgatggggccgttcgtctgggtgttcggcgtgttcgccgcgattggcaaggcgatcgcgaaactgttcgccaagcgtccgtacgaggcgctgtgcgaactggtcgccccctggacgctgtggggtggcctgcctcgcgccatcgcggcccgtcgccgcgtcagccgccaggagtcggtgccgatcgggcgtctcggcgtcctcgtcgccaaccggcagcaggtggcgcaatggcatgaccgcgtacaggcgctgtcggaccagcgccatgtcgtcctgctgtcgccgctggccaaggcccacttgcgccggcgtgcgattcagcgctggctgctcgcggtggcgatggccttggtatgcttcggcgtcgtggcggtgatgcacggcaccacattgcgtgccgttctgtcgggagcgtccctgtactccgattcgctgctgccgaccggcggggacttcggtcagctgtggcgagccgccaccacgtcgtgggtgttcggtgacggcatcgccgccccgcccgcaccgtggctgctggtatggggactggcctcggtgataacggccggcaatgtgtctgccgcgatcgcgttggtgacgtttgccgcggcacccctcatggcgttgtccttctgggcgttcgccggcgtgttcacccgttccgacgcggtccgtgtcgcatgtggactgctgtgggcgtcgttcgcgctcggcctggggctgttctccgcaggcgatgtgccgatgctcaccgtgatggtgttcctgccggccgcgttcgccttcgtgttccgcgcggtgggtctgtatcgcaccgaggaccaggtgacggcccatccttccgttcaggctgcggctcttgcggcgttgtgcttcgtacccccggtcgccgccgagccccagctgatgctgtccctgatcgtggtgttcgtcgtgttcctcgccgtggtgccgcggcatcgcgcgatgctgctgctgattccgctgccgtcagggttcgtgatcgcgccgaccatcatcagcgcggtgcaccatgcttcggaagggtcgtggcgtcagctgttcggtgatgtgatggtgccgttatccgccaggaacggcgctccggatgcttccgggttcgccatgctgaccatgcgtgcgttcggtgtcgatgatacggccggcaacggtctggcaggcctgtcggcggccggcgttttcggtatcggcgtcctggtgctgctggccgtggtgacggtgcttgcggtggcgtcgctgttcctgcccttcgcattgcgcgcctcgcgcatgatgtgggtcgtcacgctcagtggtggggcgcttgccgtcgcatcgtcgaggatcgtcgtggccgtcgatgatgacggtcctgtcgcgggttccgtgctgcccggcgtggtgttcgcgctgcttggtctgctcgcctgcgtcggattggtctccggaatggcggtccaccggttctccctgttgcggcaggggaatggctcgcaacccgtgctgacacgtcttgaaggccgcaaggccaaaaacgccaaggtgcatgcggtgttcgcccgtatcgggcgcggcgcgctggtggccatgctggtggccggtgccgtgtcatgcactgcggcgtcagccatggaaccggggtcgaacggtctgcacgcgtcccgttccgatgacgggctgcccatggtcgccaccgattatctcggcaaggacgacgcgcaccgcgtgctcgccatcaccgccgaatcatccaccggcgtacggtatacgacgatgcgcacgtcacgcggcgatctgatggacagctctccggcattgcgtgcccgagtcgcggatggcggtcatgactcccgcgacgccgtactgtcgtccgcgagcgcccggctgctggtcagcgccgatgccgacgcgatcgccgatatcagcgcgttgggttacggcggcctgtatgtggtccgtccatcggctgacgatggcggctcccaggccacggaacagttgatttcgaacatcacggcgagtgagggtatccaatccgtggtgagtaacacgtcgggtgtctattaccggctcacgctcgtcgacagcgcgacgcagcgcgtgccgcaggacggtatgctgaaacagcggcatcttgcctaccggtatgcatggctcgtgtgcatgggcgtggtgatggggctgtattgtgtcgtcgcgttcccgcgcagccaccgtcgtttcatcgaggaggaccaatgagcagccaagtcaaacgtggaggcaaggtctggaaggctgtggtcggcgtcatttccacggtgatcatcgtcggcctgttcgtcgccctgctggtactgacggcatcgggccgttgggtcgactccgtctcgtcggattcggcgtccgtctcgcacgcggtgagccagaggcggatcaccgcatactgtccgtcccgcatgacattgccggatgcgtcggcgtacggtgacagcgaatatcagccgagtgaaggcgacatctcgtcttcggccggattcgccgcgttcggagcggtgtaccggtctcagttcggcgcgtttggcggctccggcgataccacgcagctcaaggacctcgaccctacggataccgcgaaagtcatcgcagcctcggccgacgtcgaccgtacgtcgctgctgttcgacacgcagctgttggaatcggccgcgggcgtcggcgcttccgcgtccgtggcgtcctgggcgacgaagggcgacctgcgcggcctgtccgcgacattctgcgatgtcggtgcgctggagcagtcgttcgtgctgcctgacacgcagaccggcaccacccagcagctggtcgtggccaattcgtcttcgaaggccactgtggtggatgttcgggtgtggggtacggaacagtccggtgcgctggcgttgtccacgggaagcacgctgaccgtcgcggcgaacgccgaatccgtgctgagtctttccgcggccgcaagcgggcagaaggggctgtatgtcacggtttcgagccggcagacgccggtatcggcatcggtgcgcgtgatcaggaccgaagggctgaacccgaagggatcggattacgccgccgcggccggggaggcgtccaaggagctcgtcttcccggccgtcgcggagggagacaaggcgacactcaccgtatacgcggccggttcggggtcgctcaccgccgcatgggtcggcgcggccgggcagtccgtccatcagtattcgggcgaccgcgtcaccaccatcgatctgggcgatgttcccaaagatgcgtcggcgctgaagatcacggcggatacgaaggtgacggcaggtgtgaccgtcagccgtgacgggaacgggaaccagtccgatttcgcgctgatcggcgccgcgcagacagacgaccggtcggccgccgtcattccctccggtcttgacggccgtgtgagcgtggtgaacgcgtctttatccagcaaacagatgcacatgaccggttacgacgacaagggtgccgcggtgggggagaagaccatcacggtggacgccggtgccgcggcgagcttcgacgcgtcggatttgggaaagaacgtcttcgcggtggccgccgacggcaagggactgtcatggggtgtccggttgtccagctccgcggtaagtgacgccaagctcgccggcatcgcctacatcggcgccacgccgttgatgccgctgcaggagaggatctgggcgcggtcggatatgaccatcgttcactgacggtcggtcggcggaacgttccgtggtgctccctatgaggggtgctctatgaggtttcgccccgacagagccttacaggctccaatccgggtcgatctcatccggccggcggccatagagctcggcgagccgaagcaccacctcatcgcggatggccagttccagatccatgcggctgcgtgatttgctctgtatcggcatgcggtacagcacgatgcgggcggggatgccgtggctcgcagggaaacactgggacgcgaacgacggctccggctcccaaggagccggctgcgagggcggcacatcctccacggcgaactgcaccggcttgaccagttgcggccaggcgccgttcagacgccggatctgggccgcgaccatgtcgtcgaacgcgccgctgcgggtacggtagcgcgggagccgcgtgccgaacatcggcgtgcgcatgccccgcccgtgacgattgcgatacgttggtcgttcccatggtgcctgttgcatggactccactgtaggacaagccggcggcaatgcgttaggatacttatcatcgacaaggtttcctggggaggtgtacagatgccaacagcgaccgtgcacgcttggaatgataccggttggcgacacgacggcgcacatgcgcgtctgatcgccttcgacctggacaacacgctggccgtctccaaacaaccgatgaaaccggatatgaccgttcgcatcgaggcgctgaccgaactgatgccggtggcgattgtgaccggcggcgggcgtgaactggtcatcagtcaggtgctcgacgtgctgggtccccgagctgacctttccaacctgcatgtgatgccggcggggggatcgagctattaccgctggcgcgagggcgcatggcgtctggaatacgagaggacgctgtcggcccgggacagggacgcggccatattgtcgctgactcgacgcgcccgagagctgggcatgtggccggagcacccgtggggggggcccatcgaggatcgtggcagccagatcacgttctcggctctggggcagctcgcgccgatcgaggagaagcgccgctgggatcccgacgacaccaaaaagcggcggctcgtcgccgcggtggcgggcgacctcggtcatctgcgcgtacgcgcgggcggctacacgagtgtcgatgtgagcgccggaaacaccgacaaggcgttcgccctgcgcgaattggcgggacggctcggcatcggcatcggtgacatcatcttcgtgggcgaccggatgacgcccggcggcaacgactatcctgccgcgcaggcgggggctatcgcgcttcaggtcaccggaccgcaggataccgtgcgtctgtgcgacatcctgctgcctttgctgggtggcgagccggttcggcaggacggatgaaccatgggatggcacggtttcgcgcgaatgctcacagaagtggccggatcgctgcgggacgtgctgctgccgcgtggctgtgcgggatgcgacatgccggacgctgtgctgtgcgatgactgtcgtgcttcgggtggcggcttcatgtcgttcgctatgcctggcacggtttcgggccgggcgattgcctgcggcgcatatcgcgggccgctgcgccgtgcgatactgcgatggaaggatcatggcgacgaggaatgcgatggcccgttcgccgatatgatggccgacgcgctgctttcgtcgggcctgctggcttcggatccgatgccggtgacgacattggtgccggccccatcctccccgcgttcgatgagggagcgcggacggtggcatatgcgtaacgtgacgaactcattggcacggtcgctgcggcggcgtggcatggacgtcgatacggccgcgctgctgcggacgacgaagacgagcggcaaatccgtgcagatgcacggcgccgcccagcgttcgcggcgtctgcaggggcatatcgtcatcgctgcgcgcccaccctacccacgcaacgtgatcctggtggacgacatcgtcaccacgggcaccacggcccggcaatgcgcgcaggcgctcaacgccgcgggaatacatgtgacaacggtcatctgcctggcgcgcaccctgcgcaccggcgaaaacatagacgactagccaagtcccctcccgctggcgagaggggacgcgcagcgccggcggagggtggccaccacccggtcgagccgcacacccgccatccgcgcagatcaccagcgcaatccagttatttccgtcgcagccgacgctgtggatgaaaactgcccgtgaccacgccccatatcacgacatccccatgttcggaggggacgaaatcggggtagcgtggattctccgcgtgcagcatggggcggccgtcgcgcgacagcagtcgcttgaccgtcagctccccatcgagcacggccaccaccacatcgccgtcctcgggcgtcagcgaacggtccacgaccagccaatcgccgtggaaaatgccggccccctccatggagtcgccggcgacggtgacgatgaatgtgtattccgggtgctcgatcacatgagcgtcaaggctgaagccctcctcccgcccgtccaaggcgggggaggggaagccggccgctaccatctcggtgacgatcggcacgggacggggatccggtcgcgcatgaaccaccgaacgtgccgtgcaggcttcgggagcgcaattccggctcacaacagggcccgcgccgaaccgtcggtcgccggctcgtcatcggcgatatggtatttcggcaacacgatctcgaaatccgcgccgcgcgggtcgtcgaccacccggaccgtgccaccgtgcagctgtgcggcccaacgcgcgatcgacaatccgatgccagtgccgcccgattcggtgccggggccgctgcgccccttgacgaaccggcggaagatgtcggaacgttcctcgacgggaatctgagacccgaaattcaccacattcgtgacgattgtgccggtgtcggcattctcccgagcctcgatcagcacgctggtgccgtccgcggaatgcttgagcgcgttcgcgatgatattggtgaacagctggcgcagccgatcctgatcgccttccatccagatatcggaatccacgtgcagcatgatgtcgtgcgcgtgcccggcgtccgcgatctccagcggctcgatcgtctcgtcgaggaaatcatgcaggcagaaacgttcgatgttcaggctcgccgcgcccgcctccatgcgagacagatcgagcaggaacgctatcaggtcggatagccggtgcgtctggcccagaatgccctcaagattggccggcgtgggctcgaccaccccgtccgccatgttctccaccatcgcctgcagcgcggagacgggggtgcgcagctcgtggctcacgttcgccaccacatcgcgcctcatctgatcggcgtgctgcagttcctcggccatttcgttgaacgtgcgggccagctggccgatctcgtcgttgctgttggtcgccacgtggacgcggacgctgtaatcgccctccgacatcgcctcggccgcgtcacgcagctgcctcagcggcgcgatcagaccccgtgagaagaaataggtgatgcccagtgcgacgatcatggtcagcggcatggcgatccagccgctccacccgtacttgagcaggaaccagaccagcacgaacgcgatggacgtggcgatgacgatcaggacgctcaattccattttcagggacgaaaacagcccgatcggacgatcgaaatccaatcgggcctgtttcctgtcccgcttctgacgcggcttcatcactgttccggcggctcgaaagcgtagccgacgccgtgcacggttcggatggtctcggaaccgagcttatgacgcagcgccttgacatgggagtcgacggtgcgggtgccggatgcatccacccagtcccagacctcttcgagcagcttctcgcgggtgagcaccgacttgggtttgcgcgcgagcgtgaccagcaggtcgaactcggtcggcgtcaggtgcacctgctcgccgttgaccgtgaccagacgctgtgccgggtcgatgaccagcgagccgaagttgaggatcttctcgttctcagagttcttcgcgatgaccttcgcgcgttccacgcggcgcagcagcgccttgcagcgggcgatcagctcgcgcatggagaacggcttggtcatgtaatcgtcggcgcccgcgccgaggccgatgaccttgtccgcctcggcgtcgcgggcggtcaggatgagcaccggcaccgggcggtcggccacgatgcgcttggttgcttcaagaccatccatgaccggcagcatgatgtccatgattaccaggtccgggcgcagctgcttggcggcctgaaccgcgctggcgccgtcggacgccacgcgggcggaccatccctccgcggtgatgcgctgagcgatggcggtggcgagggtcggctcatcctcgaccaccagaatggtccgcggcgtcgtttgacgtgttggagaattaatcatgacgattcacctttcagttttccggtttcaagaataccgcccccaatgccggaatggtgagttttgccgaccaatcacgcgaatggtactcgcccttcaccgcggcgaacgtgccgttgtggatgtcggagccgccgtacttcttgtcgtccgtggtcagcacctcggtccagttgccgccctgcggcagcggaacctgatagtcctgccacgcctcgccggagaagttgaccacgacgacgagctgttcgcccttgctgccgatgcgcaggaagctgagcgtattgtgatcggcgtcatcgctggtcagccactggaatcccgccgggtcgaagtcctggctccagatggccggcgtgtccttgtagaactcgttcaggtcggcgacgagcttctgcacgccgcggtggtcaggccagttgagggcgtcccagtcgaccgaaccgtcatgattccactcgccgtactgcgcgatctcgttgcccatgaaggtgaggttcttgcccgggtgcgcccactggtaggcgaacagggcgcgcacgccggcgtagcgctgccagtcgtcgcccggcatcttgccgaacagcgagcccttgccgtacacgacctcgtcgtggctgatcggcagcacgtaatgctccgaataggcgtacaccatcgagaaggtgatctcgttgtggtgccatttgcggttgatgggggtctcgtgcaggtactgcagcgtgtcgtgcatccagcccatgttccacttgaggccgaatcccagtccgccggcgtcggtcggtgcggtgatgccggggtaggcggtggattcctcggcgatcatcatgacgccggggttgttcttgtacgcggtggcgttggcttccttgaggaagtcgatggcttcgaggttttcgcgacctccgtagatgttcgggcgccactggccgggcttgcggctgtagtccaggtacagcatcgaggacaccgcgtccacgcgcagcgcgtcgatgtggtattcgtcgagccagaagcaggcgttggcgaccaggaagttgcgcacctcgcgcctgccgaagttgaacacgtacgtgccccagtcggggtgctcgccgcgcagcgggtcgggatcctcgtacagcggggtgccgtcgaagcgtccgagcgcgaaatcgtccttcgggaagtgagcgggcacccagtccatgatgacgccgatgccggcacggtggaacttgtccaccaggtacttgaagtcgtccggattgccgagtcgggagtccacggcgtagtagccggtcacctgatatccccacgagcccgagaacgggtgctcggtcagcggcatgaactcgacatgcgtgaagccttccttggccacgtagtccacgagctcgtccgccagctcgcggtagttgccgatgcccttcttccagctgccggcatggacctcgtagatgctgaccgggccggcgtgcgggtcggtgtgcctgcggtggtccatccatgcctcgtcgttccattcgtggtccgattcgacgacgatggagccggtcgccggcggaatctcgtgggagcgttccatcgggtcggccttcatcttccactcgtggttcgcgttgagcagctcgtacttgtagacctcgcccgccttgacgccggggatgaagatctcccagatgcccgaggaaccgagctcgcgcatggcgtggcggcggccgtcccaggagttgaagttgccgaccacgcggaccgcgtgcgcgttgggcgcccagacggtgaacgaggtgcccacgacctggtggccgggagcaccgtcggcgccgcccatcgggtcgtcgtagcggcgaacgcgcgcgcctagggcctcccacaggcgttcgtggcggccttccccgaacaggtaggcatccatgtcgccgatggagggcaggtaacggtacgggtcgtcctccatgacggacttgccgccctcgtaggtggtgcatacacggtagtcgggcacggcccagccgtccgcggtcttttcggccgcgatgacggccacgaagacgccgttgaattcgtgccgggcctcggccgttcccttctgggtgtatatggtgacgctcttggccagtggcctgagcactcggatggtgacggttccggcgtggtctccggaaccgaggtgaccgcccagcacttcgtgcgggttgtagaacgttgcattgctcaccgcgctcaaatcactttgattcactggcacgggagcgatatcttcattgaagttcgtgtaagtagccataacacagagggtaataccttcggggcactattgcgagattttggcgagccgtgtccggagtgttcccaccgtcccggctgtatggcacaatacgtaaggttaagtatattgttgtcacggaggattcatggggtacaaggtcggcgatatggtcgtctatccgcgtcatggagcggcaagggtcgaggccattaccgaacgggtggtcaagggcgtgaagcgggaatacttgcaactcaccgtgctgtcttccgacggtctggtcatcaatgttcccgtcgagaacgcgcagaaggtcggagtgcgtgacatcgtcgacgccaatgaggtcgccaaggtcttcgagatcctgcgtacgcccatcgtcgagaaggagatgaactggtcccgccggtacaagctgaacgtcgagaagctggcgaccggtgacgtcaacaagatcgccgaggtcgtccgcgacctcgcccagcgcgacgtggacgagcacggcctgtccgccggcgagaagcggatgctcacccgcgcccgcagcatcctgacctccgagatcgccctgtccgaagaccttgacgaggccgagatccagcgtctgctcgacgtcaacctcggtttctccgagccgaagccgggcgacgagaagcatcacagcgaggcacccgccgagcctgccgaccggaccctggcccgcatcgaatccgaaagcaagaagtcccggcgcaagtagccggcgacgagcatgtccatgaacgctgttccagcgattggtcaagggtttgacgcgcatcgtttcgccgaggatccagcccggcagctatggctcgccgggcttttatgggatggcgtcggtatcgagggggattcggacggcgatgtggccgcccacgccctgatcgatgcgctgttgtccgccgctgggctgggagacatcggcggactgttcggcgtgggagccgatgctccgggagccggcatgcacggctgcgatatgttgcgaagaaccgtcgatgtattgcgatcgcatggaaggatgccatccagcgccagcgtggtcatcatcggcaatcgtccgaagatcgggcgacgccgggaggaagccgagcgcgcactgtcggatgccgtcggatgccgggtgacggtgaccgccacgaccaccgaccatatgggattcaccggccggggcgagggaatcgccgccatcgccaatgcgctggtgctgtaatcgagcggaatcatgcgaatctcagcggggattcgcatgattccgctggacaacgcccgcattcgcccgattcgcgggcgtcgtccagagtaatcagcgatgacgcagcgacgtcacgcccttggcgatcgcccagaacagcgtcgacaacgtgacgatgatgaagctcgggggagcggggaacatcgcggacagcaccagaccgccccagatcgacaccaggcacagcaccgtcgcgatcaccatcgccttgaacggcgaggcgacgatggcgttcgccgtggcggccggggtgatgaccagcgcaaagatcagcagcgtacccaccgcggggaccgcgatggtgatgacgccggccatgatcgccatgaacgcaacgttcatcagcccgataggcacacccttggcctgcgccacctgttcgtcgacggagctgaacagcagtggccggtacacgatggccagcacggcgagcaggatcacgtcgaacacggcgaagccaaggatctgatcggtggttatagtcaggatcgagccgaacagaatggactgcatctgctgtgacgcggacgacgagagtcgggcgaagaacagtccgaggccggtggcgaaggcgagcacggtgccggtggcgatctcccgctgcgtggcgcgcttgcccaacgctccgatgaccagcgcgccgcccagcgcaaacactcccatgccgagcgagaccggcagccccaacagcaccgcgccggtggcgccgggcagtccgatatgggccagcgcgtgcgcggcgaacgtcgaatggcgtgcgatggtgaaatatcccatcacgcccgcggcgagcgagatgcacaggcccgcgaggaaggcgttggtcatgaacggggcggacagggtgtacatccagtcgggatcgaaggagaaactgatgccggtcattgtgcccgccctttccgctcgtggtattcgtgatggtggaattgtgcgacctcgctggtgtcatgcgtgtcgggaacgacgtcatccgcctcgtcgggggtgggggtgacgaacatgtccccctgcggcgtggtgacgacctgcactttggtgccgtacaggtgcgtgagcagcttggaatccagcacgtcgttcatcgccgcgtagtgaggatgcccgtccagcagatagacggcgccggtcaggatcggcagcagcatattgagatcgtgcgcgacgacctggatcgtcatgccgagctccttgttgagccgtgccagcacatgcaccacggcgcgctggctggccaggtcgagattcgcgagcggctcgtcgagcatgagcagtttcgggccgcataccaaggcctgcgcgatggcgacgcgctggcgcagaccgcccgaaagctcggacagccggtagtgggccttgtcggcgatgccggtgaaggtcatggcctccttcaccttcgcgcgttgcgccttggtgacgaagtggacgccgaaacgggtgccggtcaggccgagcagcaccgactgctcggcggtgagattggagtcgatgtccgaagtgtagctttgcggcacgtacccgatctggcggttcatctcgcctgccgggcgtccgagcacgtgcacggtgcccccggcgagtgggaggaggccgagctccgttttcatcatcgtggttttgccggtgccgttcgtgccgactatggcggtgaccgaacccgccggtatggagaagtcgccgtgttgccagatcagccgttcgccgcgtttcaccgaggcgttgctgaacacgatgcagtcgggccgttgttcccggtcgccgctgttgctgtgcatatgattcatcgtcctgtctgtacgggaccggcatcacgtccgccggtgcgacatgtacggcaacgcattatcgcaaaggactatgacaatcattctcattagcggtggcggactcattagcggcggaagagacggcaatggtaacggtctggagcgggcgggcgaactcagttgctgctgccggcgccggtatcgcttttgtcgtcagcactgttgccggcatcgttcttggcgctggcgccgtctttgccgtcggaactgccgctttcgtcgctgtcgtcgatgatggcgggggagacggtcttgtcaagccgggccaccagatcggcgatccaatcagtcagcgtcgtgtacgcctgcggcatctgctcactgacgtcgaacacggggacgcctgcccgtccggccgtccctgtcagcatgttggtggcgtcgctggattcctgcgtgttgttgaccagcacgctgatgccttgtgattcgatcagcgactggaattcctgcaggtcggccggggcaggttcgccgcccgaggccgcggatcgggcgaaccccttgggagtgtcgtcctggaagcccatgtccgacatcaggtagtacgccacggcctccgtcgcaccgtacgtggcgttcttgtggttggcggcgaactcgcccatcgacttctcgatggccttttcctccttttgccatgccttgaggcgcgactggaacgccttcttcttggcggggagcgccttggaaaatgcctccgtcagttcggtcgccatgccgttgcgggcgtccttggagaaccataggtgggggttgtcgccttccatagctccgaccgtctcggcggccgagacgatggtcgagttgcggcctacggacttggtcgcccatgagtcgtatccggcaccgttcgacacgatgatctgcgctttctgcagcttggcgacatcggatgttttcggttcgaaatcatgcgcgtccacattcgtggagctgaggatggaggtgacgttcacgtcggtgccgccgatctgctcggcgagggagccccactggttgatggacgcgacgacggtgatcggtccggtcggctccttcgcggagggccgctcggattgcgagccgccgccggtgccgcaggcgctcgacgccatcagcatgcctgtggcgaggatggcggcaatgccggtgaccagacgatgcggatgaatgttcatatcgctgccttcttcgaatatgccgtcgacggtccgccgtcggattgtcattgacctgagtccacgatagcctaacgctacgaagaatgaacgaactctagggaaggacgcacatgaccatcaaactcgatggcaagcgggtcgcggccgaggtcaaggcgaacctggcggaacgtgtttcgacgctgaaggagcacggcatcgtccccggtctgggaacgttgctggtcggggaggatcccggttcgatgaaatacgtcgcgggcaagcatgccgactgtgcggaggtcggcatccgttccatccggcgcgaccttcccgccgacgcgagtttcgatgacatcgccgctgcggtgcgcgacctgaacgaggatccggcctgcaccggctacatcgtgcagctgccgctgccgcgcggcgtcgacgagaacacgatcatcggcctgatcgatccctcgaaggatgccgatggcatgcacccatacaatctcggcgaactcgtgctgcatgtgcagggcgacatcacgaccccgctgccgtgcacgccgcgcggcgtcatcgaactgctcgacgcctacgacatcgacctgaacggcaaggaggtgtgcgtgctcgggcgcggcatcaccatcggccgcacgatcggtctgctgctgacgcgcaaggcggtcaacgccacggtcaccctgtgccacaccggcacgcgcaacatcgccgaccacatgcgtcgcgccgatgtcatcgtcgcggccatggggtcagccgggttcgtcaagcccgaaaacgtcaaggacggcgccgtgctgatggacgtcggcgtctcccgcgtgttcgatgagcagactggccgtttccgcatcaggggagacgtcgacaaggcctgttatgacaaggtttccgcatactctccaaaccccggcggcgtcggtccgatgacccgcgccatgctgctcgccaacgtcgtggagatggccgagaggaaaatgtagccgaattcgggcgtgtcgcgctggtttttccgcccattttgggcatggctgtaggtatcctgataacttgtgtgtgctcatatgagtgcacatgtataactgaatatcgagtaattattcatccactattagaaaccatatatttacatggcagagaacaacactgaagtcaccaaggtcgccatcaacgacattggcaccgaagaggacttcatcaaggcagtcgattccaccatcaagaacttcgacgatggtgatctggtcgaaggtaccgtcgtcaagatcgatcacgacgaggtcctcctggatatcggctacaagaccgagggcgtcatcccctcccgcgaactttccatcaagaaggacgtcgatcctgacgaggtcgtcgaggtcggcgacaccatcgaggcccttgtcgtcaccaaggaagacaaggaaggtcgtctgatcctgtccaagaagcgtgcccagtacgagcgcgcctggggcgacatcgagaagatcaaggaagctgacggcgtcgtcgagggcaccgtcatcgaagccgtcaagggcggcctcatcgtcgacatcggtctgcgtggcttcctgcccgcgtccctcgtcgaaatgcgtcgcgttcgcgacctctccccgtacatcggccagaagatcaaggccaagatcctggagctcgacaagaaccgcaacaacgtggtcctgtcccgccgccagtacctggaggagactcagtccgaagtgcgcgagaccttcctgtcccagctcaagaagggccagatccgcgagggtgtcgtgtcctccatcgtcaacttcggcgcgttcgtcgatctgggcggtgtcgacggcctgatccacgtctccgagctgtcttggaagcacatcgaccatccgtccgaggtcgtcaaggtcggcgacaaggtcaccgtcgaggtgctcgacgtcgatctcgaccgtgagcgcatctccctgtccctcaaggcgacccaggaggatccgtggcagcgcttcgctcgcacccacgttcccggccagatcgtcaagggcaaggtcactaagattgtccagttcggtgtcttcatctccgtcgaggatggcatcgagggcctggtgcacatctccgagctggcgaaccgccacgtggagaacccggagaccgtcgtcaagcccggcgaagaggtcttcgtcaaggtgattgacgtcgatctcgaccgtcgccgcatctccctgtccctcaagcaggccaacgactccgtcgacccggcttccgaggacttcgatccggctctgtacggcatgccggcagagtacgacgagcagggcaactacaagtaccccgaaggcttcgacccgaacaccaacgagtggatcgccggttacgagaagcagcgcgaggaatgggaatcccagtacgccgccgcccacgaactgtgggaggagcacaaggcgttcgtcgccaaggagctggagaacgccgcggcttccgctgccgaggatggccaggctccgaaggaagagaaggtcgaggagacctccaactactcttccgacaactcctccacgggtactctcgccgactccgaccagctcgccgctctgcgcgatcagctgctcggcaagtgagtcatctcatcccgagaagaagtagaatgccggtaggatttgccggcagatagaaaaacgggaatcgccccacacgggtggttcccgttttttcatatcccgctcccgccggcgggagcggtcgagcatagcgagactgagggttgtctttgcgcgatgccggtcatcctcacttcccggctgccctgaacaaccgcgacacgcccggatatccagcaagcctgccatgcgcgaatcagtgaagtggcggaatgctgcgaaagtccaaaaactcgccttccatctctgccacgaaaccgggcgtgacgcgaatagcatgatgacatgagtattcgtatcggactgaccggaggcatcgccgcgggcaagagcaccgtcgccgcccggatgcgggaactcggcgcgctggtcatcgactatgacggacttgcgcatgagatcgtggcacccgggggagtggcgttgccgcggatcgccgccgtgttcggcccggacgcgctgctggccgacggatcgctcaatcgggcgtggctcgccgagcgtgtgttcggccgtgacgccgctcccggcgcacgcgaacggttggacgacatcgagcatcctctgatatatgccgaagccgcacggctggagcgacggaatcccggcgcgaaggtcatcgtccatgacgtgccgctgctcacagaggtgatccggtcgattccgttccaattcgatcacatcgtcacggtggaggcgccggaacagatgcgcatcaggcgcatggtcgcgacgcgcggcatgaccgaacggcaggccgcagaccgtatccgcagccaatcgagcacagccgagcgccgggagcttgccgacatcgtcatcgattccacccgcccgatccccgacatgctggcgcaggtcgatgggctgtatcgccggtggaaggctcactgaatcattcgcccgtgaaaaggtgtgagcccggcagcgccgcaaaacgcacatgaaacccgccaaatcactgtatttccaagacatgcatgttttgtgcgattgtgctgttttgtgcgttatcctcgcacttttcttattgagaaccgttcgctgaacggatggcggtaagctggaagccatgggattcaacatcgagcgcgccgacaagccattcgtcgtcaaatcaccgtacaagccgtccggcgaccagccgcaggccattgaggagctggccacccgcatcgagaacggcgagaacgacgtggtgctcatgggagccaccggtacgggcaagaccgcgacgaccgcatggctcatcgaacggctgcagcggccgacgctcatcatcgagccgaacaagacactcgccgcgcagctatgcgccgaattccgcgaactcatgcccgacaacgcggtcagctacttcgtcagctactacgactactaccagcccgaggcgtatataccgcagaccgacacgtacatcgagaaggactccaacatcaacgacgatgtggagcggttgcgccatcaggccaccgcgaacctgctcacgcggcgtgactgcgtggtcgtcgccaccgtttcgtgcatctacggcctcggtacgccggaggagtacgccggccgcatgctgttcctccaggaaggccagcagattgaccgcgatcagctgcttcgcaagttcgtcgacatgcagtacaagcgcaacgacatcgcgttcacgcgcggcacgttccgcgtgcgtggcgacaccgtcgagatcatcccggtatatgaggagctggctatccgtatcgagttcttcggcgacgagatcgaccgcatctccacgttgcatccgctcaccggtgacgtgatcgaccacgagacctccgtgcacatcttccccgcctcgcattacgtcgccggccccgagcgcatggagcatgcgttgaagaccatcaaggaggagctggaccagcgcgtggccgaactcaagaagcagggcaaggagctggaggcgcagcgcctgaccatacgcaccacatatgacctggagatgctgacacaggtcggcgtgtgctcaggcgtggagaactattcgcggcatttcgacaaccgcgcacccggtacgccgccgcacacgctgctcgacttcttcccggatgacttcctgctggtcatcgacgagtcgcatgtcaccgtgccgcagatcggcgcgatgtacgagggcgacgcgtcccgcaagcgcacgctggtcgaacatgggttccgtctgccgtccgcgatggacaaccgcccgctcaaatggccggagttcctggaccgcgtcgggcagaccgtatacctgtcggcgacgcccggcgactatgagctcggtctgtcggacggcgtggtcgagcagatcatccgaccgaccggtctggtcgacccgaagatcgacgtgcgcccgaccaaggggcagatcgacgacctgctcgccgagatcaaggaccgcgtcgacaaaaacgagcgcacgctggtgacgacactgaccaagaagatggccgaggatctgaccgactacctgctggaacgcggcatcaaggtcgaatacctgcattccgacgtcgacacgctgcggcgcgtcgaactgctgcgcgaactgcgcgaaggcaagatcgacgtcatcgtaggcatcaacctgctgcgagagggactggacctgcccgaggtatcgctggtggccatcctcgacgctgacaaggaggggttcctgcgctcgtaccgctcgctgatccagaccatcggtcgcgcggcccgcaacgtatcgggcacggtcatcatgtacgccgacgagactaccgacgcgatgcgcaaggccatcgacgagaccgaccgtcgccgtgtgcggcagatcgcctacaacaaggagcacagcatcgacccgaagccgctcatcaagaagatcagcgacgtcaacgacatgctcgccaaggaggacgtggacacggccacgctgctcgaaggcggctaccgcaacgcgggcaaggccggcaacacccatctgggtgtgccctccctcgacgccgcggaggccgacaagcgacatgaggagatactcaaggcggggcttcccgcgcaggatctcgccgaccttatccgtcagctgagcgagcagatgcacaccgccgccgaacagctccagttcgagctcgcagcacgcctgcgcgacgagatccgcgacctcaagaaggaactgcgccagatgacggaagcgaacaagtgagcatttcgtgacagagagcgtcacagccctttcctatgctggtagacatgtctgaaacccctgtcgcttttatgatcgccacctttgcggtgctgatcgcgtttttcgttgtggatctgttcgtcatcggccgcaagccgcatgtgcccagcaccaaggagtgcgtgcagcacatcgcctttttcgtggtcatggcgctgattttcggcggactggtatggtgctttgccggttcgaagcccgcgatcgaattctattcgggatggctcaccgagtactcgctgagcatcgacaacctgttcgtcttcgtcatcatcatgtcgaacttcgccgtgccgaaagtgctccagaagtacgtgctgtccgtcggcatcaccgtcgcgctgattctgcgcggctgcttcatcctggtcggcgcggccattgttcagcggttcacgtgggtgttcttcctgttcggcgccttcctgatctatacggcgatcaagctggtcgtcggaggcgatgatgatgaggaataccatgagaacggcctgatccgcatgctgcgcaaggtgattcgcatcaccgacgattatgacggcgagaagctgcgcaccgagaaggacggcaagtcgtactggactccgatgctgatcgtgttcctgaccatcggcacgacggacgtcatgttcgcgtttgattccattcccgcgatcttcggcctgacgaaggatccgttcatcgtcttcacgtcgaacgtgttcgctctgctgggcctgcagcagctgtacttcctgctgggcgcactgctcgacaagctcgtctacctgccggtcgggctcgcgttcgtgctcggcttcatcggcatcaagctggtgatggaggcgttgagcggcaatacgctgccgttcatcaatggcggtcacccggtctcttgggtgcccgaggtaccgacgtgggtgtcgcttgtcgtgatcgtcgtcgccatcggatcgtcggccatcgcgagcgtcatgaagatgaagtcggtcgaggccgcgaagagcgaagcctgagccgcccaaaagatgtgagcgctcacaacacgcccgtgaaaacagtggctcacgtcgcccaaacctagtacacttgcctgtggcagtggaagtcgcaagacttcttcctagaagaaatcacataagaataggtaggcattcatgcgtaaagccaagatcgtagacaccatcggtccttccaccgagtctcccgaaggcatcaccaagctggttgaggccggtatggacgtggcccgtctgaaccgttcccacggcactccggaggatcacctcaaggtctacaacaacgtgcgcgcggcctccaaggcaaccggtcgtaacgtcgccgccatggtcgatctccagggcccgaagatccgctgcggctggttcaagaagaacgccgagggcgaggacaaggtccagcttgaggaaggccaggagttcatcatcaccaccgacgatgtcgagggcgacgagcacatcacctccaccaccttcaagggcctgcccggcgactgccaccccggcgacccgatcctgatcgacgacggcaaggtccgtctggaggtcaccaaggtcgagggcaacaacgtgcacaccaaggtcgtcgttgccggcccggtctcctcccacaagggcatcaacctgcccggcgtggccgtgagcctgcccgccctgaccgagaaggatgaggccgacctgcgttgggccatccgcaccggcgccgacatcatcgccatgtccttcgtgcgtttcgccaccgacatcgaccgcgcccacgagatcatggacgaggaaggccgtcgtatcccgatcgtcgccaagattgagaagccgcaggctctggagaaccttgaggacatcgtcaagacgttcgacggcgtcatggccgcccgtggcgacatggccgtcgagtgcccgctggaagaggtcccgctggccaccaagcgcatcatcgagctggcccgtcagtacgccaagcccgtcatcgtcgccaccgaggtcctgggctccatggtccactccccggttccgtcccgtgcagaggcttccgactgcgccaacgccgtgcttgacggcgccgacgccacgatgacctccaacgagaccgccgtcggcgagtacccgaccgagaccgtcgccacgatgagccgcatctccggcttcgccaccgagcacggcttcgaccgcatccccgagctgaagaacctcgacatgtcctccaccggcgccgtttcctccgccgccgtcgacctggccgagaagctcaacgccaaggccatcgtcgcctacacccagaccggcaacaccgtgcaccgtgtgtcccgcgagcgtccggccgccccgatctacggcctgaccaccaacgagcacacctaccactggctggccctctcctggggcaccgaggccttcctgctcgatgaggactaccacgacaagacccgcaaggatctcatggccttcaccgacaaggtcctcaagaacgccggcaaggtctccgacggcgacaagatcgtcgtgctgagctccgctcagggcgagcacgccgctggcagcaccgacaccatctacgtgcacaccgtcggtgccaacgactgatttcagccgatagcagattcggcttccgctgtgtgacgacggaagccgaatactcatgcgtgagcccccgctccgaaacgagcgggggctcacgcgctttcgccagggaatcgcatcggctcaaggacgatgcggaaggtcgtcgcgcggatgcggggcagatgcgcgactgtctcgtgcggaaggcgaaccgcacaatctcacatgctcacatgccgatgtgctccagcagtccctcatgcaggcgaaggatcgcgataatcgtcttcgcatcaacgatggtgccgttggtcaccatctccatggcctcctgttgcgtgtacaggcgtaccgcggaacgtggcgtctccgggccgatcgcggaacggtccacctccttgagtcctgtcgccagatacagcgcggtgtactgcgaggagaagctgggcgtgttgatgaagcgcgtgaactgggtgagcttcgaagcctcgtagccgacctcctcgcgcagcttgcggcttgcaacgtccagatactgctcgcttggcgcgttggcatggcctgccggaatctccaacgtccagcgatgggtcgggatgcggtactgctcgacgaacggaatcttcccgtcagcggtcaccgcaaggacgccgacggtgtccccgttgttctcatgcaggatgaaccgttcgaactggccgacctgcgccgaactgaacgcgaccctgtccacgttgaaataatgggtctcgacgatttgcttgcgggactcctccttgaccggtgtcggacgccacggatcgaagggtctgtaagtgtcactgtccatgctcataagcctcacctttgatagttctcttatgtgtttccattgtaggtccgcgctggtgagttgcggggatattcggcgcggcgttgatgctaccggcgtaaatcgcgtgctggggcgtatggtgtccacggaaccggcgtgactcgctggaatgatgcgcggcacgcctgcaatggacgaatgacgtagcgatatgctaaactatcgcgagtgccagaaacgccctcgtatcccaattggtagaggaagcagcctcaaaatctgcgcagtgtgggttcgagtcccaccgagggcacgttgcattatcgggtgagccacagtgctgcatcgccgaatctctatgttatcgttatacatgaagttctgtcgatgaatcactgtgtcgtggaaaagaggttgtgagcatggtggcaagaaagaagacctcaacgcaagagcaagagggtcaggtagaggaggtgctttccgccgacgagctgaaggcagtctccgaaggcgagcccgtcgagagcgccgtgcacaagaagcgcacggtcgttgtcgccgaggacgagtcggtgaaccgcatggatctggtggccatgctggaggataacgggtatgaggtcgtcggcgaggcggccaatggtgaggaggccgtcgatttgacgcgcaagttccgcccggatatcgtgtgcatggacgtgaagatgccccgtatggacggcatcgccgccgccggtgtcatctgcgacgagaacatcgctcccgtggtgatgctcaccgcgttctcgcagcccgacctggtccgtcaggcgaccggtgcaggtgccatggcctacgtcaccaagccgtatgaggaatccaagctgctgcccgccctggaagtcgcgatgggccgtttctccgagatgaacgacctgctcgacaacgtcgagaccagcgagaacaagctcaaggagaccgaagagcagctcaagaaggccgaggagaaactcaagaaggccgaagacacgctggaggagcgcaagctcgtcgaccgcgccaagggcctgctcatggacaaggcggacttctccgagcagggagccttccgctggatccagaagacctcgatggatcagcgcatcccgaagaagcgtctggccatggcgatcatcgccaagtatggcgatcccaagccgtcggaagtaggggaatgagcgaatcgcgcgacgacgcccagacgaaaacgcgtggaacgttgctggtggtcgatggccactcgcttgcgttccgcgcgtttttcgctttaccggcggaaaatttcagtactcaggccggtcaggccacgaacgcggtatggggtttcgccacgatgctgtcccaggtgctggacagcgagaagcccgaccatctcgcggtcgcgttcgacatgaagggcggcaccttccgcaacgagatgctgccgcaatacaagggcacccgcgaagcggcgccggaggatctgctcacccagctgccgctcatccagaagatgctcacggcgctgggcgtcacctacgtcgaaaagcaggggtatgagggcgacgacatcatcgccacgctcgccgcgatgggggagcggtccggatacgacacgctggtgctgtccggcgaccgcgacgccttccagctgatcgacgagcgcgtcaccgtgctgtatcccgggcatcacttcaaggacctcaagcacatgacgccgcaggcggtggaggacaagtaccatgtcggccccgcgcaatacccggatcttgcggcgttgcgcggcgagactgccgacaacatccccggcgtgcccggcgtcggcgacgggttcgcggcgaagtggatcaaccagtacggcggacttgagggtatcatcgagcacgccgacgagataggcggcaagaagggcgagtcgctgcgcgagaacatcgagcaggtcaagctcaaccgcaaggtcaacgctctgcggcgcgacgtggacctcggtatcggcatcgaggacctgacattcggcgaggtggacgccgacgcgctttcggaactgttcaccagcctcgaattcggcccgcgcacccgcagcaaggtgctcaagtcgttcaacgccggcaagcaggccagcgacgcagctgacaagcacgcagacgacgaggacacctccgacgacctgaggattcccgaggccgtgaccatcgcggatgaggcggcgttggcggcatggatcgactccgcacgagacggtctcggctcgcctgccgacaattcggatgatgagccgcgcaaccgggcgcactgcgccgacgtcatggcatcgacctgcgcgctgtatgccgaaggctcatccaaacccgggaacccgggatgcagcgtgctgatgctggaggtcggcggcaaggcggccgtgctggaagccggcgtgatcgccggcgtccgtcccgcgttgcagcggttccttgacgggcacgccgaccggatagtcgtgcacgggtacaaggagcagtcgcacatcctcgcgtcgctcggactggacctcgccgagccgtggttcgatacgaaactcgccggatacctggtccagccggactatcatgccgattcgctggaacaggcggcatcccatttcctgcagctgcaattggacaatgccgatgacgtcgcgcaggggcagctggacttgagcggcgacgtcgatccggccgaccagcgcaaggatctgcttcatatggccatggttcgcgccctcgccgacatgctggccgcgaagatcgacgaacgagagcagttcaggctgctgcagtccatcgagctgccggtgtcccacgtgctgttcggcatggagcaggtcggtgccagcgtggacttcatgcgcctgaccgagatgcgcgaccggttcgccgtcgacgctcgcgacgcgcaggagaccgcctggcagttcgccgggagccgcgtcaacctgcaaagccccaagcagttgcaggccgtgctgttcgacgacatgggcctcaagccgaccaagaaaacaaaatcgggttcgtacacgaccaatgcgtccgcgctgcaggatctcgcggtccgatccgtcggcaacgagcgcgccaacggattcctgaccgcgctgctgcgccatcgcgagacgaacaagctcaagcagatcgtccaaagcctgatcgatgcggtgaaccctgatgacgggagaatccacaccacgttcgagcagaccgtggccgccaccggacggctcagttccgtcgacccgaacctgcagaacatccccaaccgcaatgccgagggccgcgagattcgctccgcgttcgtgcccggagagggctatgagtcgctgttgagctccgactactcgcaggtcgagctgcgcatcatggccgacctgtcgggcgatgacgcgctgatcgaggcgttccgctccggagctgacttccacaagtacgtggcgagcctcgtgtacggcatccccgttgacgacatcacccccgaccagcgcacccacgtaaaggcgatgagctacgggctggcgtacggattgagcacctacggtctcgcccagcagctcaaaatcagccccggcgaggctgaccggctgaaatcgcagtatttcgcgacgttcggcaaggtccacgagtatctggaatccctggtcgccggcgcccgcgagaagggctacaccgagacgatgttcggcaggcgtcggtacttccccggactgcagtcgccgaaccgcaacatacgcgacgccgccgagcggggagcactcaacgcgcccatccagggctcggccgcagacatcatgaagatcgccatgatccacgcgtccgacgcgctcgccaaggccaaggtccgtagccgtatcatcctgcagatccacgacgaactcgtggtggagatagcccccggcgaagccgagcaggtgacgggcctggtgcgcgacgccatggagcacgcggtcgatctcgccgtgccgttggacgtgtccaccggcatcggctccgactggcagctcgccgcccactgacggcgacggcacggcggcgagaacaacgacggcaagaaaagaaaagaggacaagccatgaccacgcttcgacaggtcgtcaacgtagtggaaaccctgtatccgctgcgctatgcggaatcctgggacgcgcccggcctgatcgtcggcgagcccggtgccgacgtcggactggtcgcattcgccgcggaccccaccatggcggtgatcgacgaggccatcgaacgcggcgccgacctgctgatatgccatcacccgctgctgttccgttccgtgcacgccgtctccggacaggacgtgcacggcgccatcgtcggcaaactgtacagccatcactgcgctctgtgggtgggtcacaccaacgccgatgccgcgtggcgcggtgtagggcaggctgcggccgacgcgttcggcttggttgatcagcggcctctggtgcccatcgacgacccggggtctgcgcacgccgtgggcctgggtcgtgtcggcctgctggaggagccgatgaccttggagcgtttcgcgcatcgcgtggcgcaggcgctgccggccacgaatcttggtgttcaggtcgccggcgacctccagtcgctcgtgcggcgcgtcgcggtgctgccgggatcgggggactcgctgttcgacgaggtgcgggccagcggagccgatgtgtatgtgaccagcgacctgcgccatcatccggcgactgacgccttggaacaggcgcggtacgaggcgtcgctgctctcgcgcggactggccgccccctcggccggaaatacgggaacggcagggagcgccgtcgcccgtccggcgctgatcaacacgccgcactccgccatcgagtcgctgtggttccgatacgccccggacgacatcgccgcggcggtcgggcgggcgacgggggagaccatacgcaccacccatatcacgatgaacaccgatccgtggacgctgaacatcccctgccggagctagccggctgccgctgcacatcgctgacaacttctttcgaaaaaggaccattcatcatgcctgaccgttcaaccgctgacaccgctggcactgccgaaaccgtgggtaccgccgccgcaagcgacatcacccggcaagtcgacgcgctgctcgaccgctccaccgacggcatcgtcatggacagccgggatcgcagggccgtcgtgctgtcgcgacagaccgtgtaccaaggggcggtgttcgacgtggaggacatgcgcatcgcgctgccggccggtggcggggactgcgtcaccgtgcgtcgccaggtgtgccgtcacgcgccatgcgtcgtcatgctcgtccatgacgaggcccgggacctgtacctgctggagcgcgagtaccgcgtaggctccgacctgttcgcctacggtctgccggcgggactgatggacgacggagaggacgtggagcaggcggcgctgcgcgagctcgccgaggagaccggcgtggtgccggtcggagaggacggcgtcatattcgaccatgtgggggcgttctactcgtcggaaggcatgagcgacgagctcgccaacatcatggtcatgcacctgcgacgctgggaaagccgaccgcgccggttcgatcccgacgaacacgtggaatctgcgtgggtgacctggcgccaactcgccggagtgccggtcaccgcgtcgaactccgtcattgccatacagcatgagacgattcagcgaatcctgaaaaaacaataagtattcatggtaaaacaaacatagtctgctgagaatttttctttatatcggtttgaagttaactatgttcacgttggcgtgcgataatatgaccatgcagcaaatacgacccggctccatgtacccgttgggtgcgaactacgacggttctggcgtgaatttcgccttgttctcgcaggtggcggacaaggtcgagttatgtctgttcgacgaggacgacaaagagacgcgcatcgagatgaccgagcagaactcgtacgtctggcataactatatttccggaatccaacccgggcaacgctacggttaccgcgtgtacggcccgtacgatcccgccaagggcatgcggtgcaacccgaacaagctgctgctcgacccctacgccaaagccatcgaaggcaacatcgacggcgacgaaagcctgttctcctaccgtttcgccgacccggacggcccaatgaacgacctcgactcagccgatcacaccatgaagtccgcagtcgtcaacccctattttgactggggcaacgaccagcatccgaacacgccataccatgattcggtcatctacgaagcccacgtgcgcggcatgaccaacctcaacaaggacgtgccgccgcagattcgcggaacctacgccggcctcgcgcacccctcggtgatcgaatacctgaaaaagctcggcatcaccgcactggagctcatgcccatccaccagttcgtcaacgactcgttcctgcaggaaaagggactgagcaactactggggatacaacaccatcgggttcttcgcgccgcacaacgcctacgcatgctcaggccagcgcggcgagcaggtcaacgagttcaaggcgatggtcaaggcataccaccgcgctggcatcgagatcatcctcgacgtggtttacaaccacaccgccgaaggcaacgacatgggcccgaccctgagcttcaggggcatcgacaaccagtcgtactatcgtctggtagatggcgatccgcggcattacttcgacaccaccggcaccggcaactcgctgctcatgcgctctccccacgcgctgcagctcatcaccgactcgctgcgttattgggtcaccgaaatgcacgtcgacggcttccgctttgatctggccgccacgctggcacgccagttccaggaggtcgacaagttgtccgcattcttcgacatcgtcgaacaggatccggtcatctcacgtgtcaaactcatcgccgaaccgtgggatctcggctccggcggctaccaggtgggcgggttcccgtcgagctggtccgaatggaacggccgttaccgcgactgcgtgcgcgacttctggcgctcgcagccgtccacgcttcccgagttcgccagccgtctgctcggcagctccgacctgtatcaggtcaacggccgcaggccggtcgcttcggtgaacttcatcaccgcgcacgacggcttcaccatgaacgatctggtcacgtacaacaacaagcacaacatggccaacggcgaagacaaccgcgacggcgaaagcaacaatcgttcatggaactgcggcgtggaaggccccacaaccattagcgacgtcaacaacctgcgccagcggcagctgcgcaacctgttctccacgctgctggtcagccagggcatcccgatgatctgcggcggcgacgaggtggaacgcacccagcagggcaacaacaatgcctactgccaggacaacgagatatcgtggcgcagctgggactccacgcccgagcaggaggacctgctgcagttcgtgtccaagctgatccatctgcggctggagcatcccgtgctgcacaggcgccgcttcttctccggacgtgagccgggcgaggacgtctcgacgatcccgcagatcgaatggttcgaccacaccggatcaatcatggacatggatgactggtcgaacacgcacgcgttctcgatgatggtgttcctcaacggctcgcgcatccccgagactgactggtacggttcgccgatgatcgacaacgatttcatcctgatcttcaacgcgcattacgagccgatcatgttcactctgcccagtgagcggtatggcaagaagtggcagctgctcatcgacacatacaaccccaaggggccggagctgagctatgaggcgggattcgccatcaccgcccaggcgcgcagcttcctgctgctcaagagttctgattgcccggcggtacgtcgcgaggacagctgagatatcgtggcaggtgcttcgcacctgcgcgctgtgtgcgctacgctgggcaggcgccgaccggtgacttgcgtgttaccggtcgttcgacaggcgggattgcagttccgcgacctgctcgttggtgccggagccgtccgcgtctcgggctggattgccggggccggcaccggtgctgttaccagtgccgggctgcagcatcatcagctgatcgtgcagacgatcggcctcgattgcggcgatttgccttgagaagacgatgaaccatcccagaaacagcagtccggcgagcgcttcgagattggtgagcgtttcctggcccatcagcatcctgatgccgatggcagagcagatcagaatcgccaaggcggaaatcaccgacatcaccttcggtatccgcggggcgagccacggcagggagagcatcaacacgcccatgatgaccgtcagtcccttggcgcacacgttgtgcatgatcgggtgcggcgtatagcggaacgcgccgatgcctatgaacatgagcccggatatggtcagcagcagcgacaggatggcgatacgcaacgtgaaatgcgtgatgtcgcggtcatcggcggcggtgccggtgcttttgttcatctgatggcgtgctcgctgtatgcgttcggtggtgatcagctccgagatggcgaagtagctgacgatgatgatgcacgttccggcgagcatcagcgtcgagttgaacatgcgggccgcgaacgtggtgcggtcgccgagctgcgagaaattgttgtggtaccagtacgggtcgtcggtggtcaggccggcggtgcacacgccggaaatcacgaagaacggcagcagcgaggccaacgtcttcgcgttcatcatctccgcctgcacgaacgtcatataaccgacgacgcccgcgaagccggcgcagatgggggtgaggtatccgctgaacgtcgccgaccccatcatgccgttgattgcgccgagtagggcgaatgacgagaggaacacggtcgccgcgtacacgatcgacaatgcgaggatctcgaacacgcgacgaatcggggcgaaccagccgcgatgcaggttgagcgaatgggagtggctggcgtaaccgacgcagaatgacagggcggcgcaaccggccagaatgcccgcgcacaccatgaaacgtcgttgggtgatctgccagatcgccggggcgaactgcatgtacagcgacatcattatcgcgccgaccatcgcgcagatcaggaatgagatcagaccaagggtctccgctcgctgatgacgtcccatgacacccctttcgccgtccggatatccattgtactcgtgcggtctcgcggctgtgttgcgttggtggccggggagggggggcggtgcgggacgagattgtgacgcgacggtacggggttatgacggggcggcgtgggacgatgaccggtatgcggcgtggtgcctgttcgtgcgtgggatgtgtcgtccggatttgcgttcctaagtgcgcgccgaaacgacgaccgtgcgcacataggtacgcaaacagggccatttgcgtacctatgttcgcgcactcgtcgtttcggcgcgcacttaggaacgcaatgggaggggcctacattgcgccgattatttggaccatcggcggggtggaagatgcgggtcgagtccaatggccccggattcggttgccaaggtctacggaacccggtgataattgaaaaacgggctcagtctcggcctatggtatactcaacatttgtgctttgccttgggctgggcacatcgggctgtagcgcagtttggtagcgcgcctgctttgggagcaggatgtcgcaggttcaaatcctgtcagcccgaccggagccctactcccgcttggggagtgggagtagagcttgaaatcgtgttgacggacgttgtcgctgcagtggccttcggtgcggtggcggaggccgcctacatcgtctaaggagcatcatgcggatatcggcaccgtgatcacgctcgggtccgggttcgtggcgttgatcgtgcccgcgttcgttcgggtattcaagaagtatattccccagcggatacgtcggatccgtgttcctcgccgcatccatccggttcggcgtcatcgccatcgccgccaccggcggattcgacggtacttatatatggggcatcgtgctcgcgggcgtagtgggcgtcgctcagaccgtgtacgcactcgtcaaccaagcctttgacggaagactgtctaaagcgtagaacagtgccgggtaaggcccgaaatcctgcgcactttgtgatttgagtttcctggaagaggatatggcccgtgccgggtacgattttcagtcgctaacactagaaaaccgcgattggaaagaggcagaggccatgtccaaggaaatcatacagttcgatgacgccatgttcgagacaaagctcgacgccatggtgcgtgacaaggtagaacaaatagtcaacgcgatgcccgacgcttcaggccgacgagatcgccaacgccgcgagatacgaacgaaccggcgaacgcaaggcgtaccgtgccggccactacgaacgcagcctgaccgccaaggccggcaggccggagccgaaggtgcccaagctcaaaggtgccctgttcgagtcggcggtggtcgaacgctgccggcggcgcgagtccggcgtcggggaggcgcggaaaccgcactgcatgaagaacagccgcgcggtgatgctggcatggacggtgagccgatcgatgccggctgcgtcggcgaaccgctcgacttgtccgagcaatagcgaggccacgccctgccgggagcatgaggaatccacgaacagcatgtcgatatacccggctttgtcgacgtcaatgaacccgaccggaacgttctaggtttcggaagattcccgtatggggtcttcgagcggatatttcgcggtttcggcgacccatgtgtgcaccgttatccggcgttcgttccattgcccaggtgtgccggtatgcccggcccatgcgcgaatctgttcgctgttgtaatcccgggaggcgatgccggtcgcgggccgacggaacaccgccatcgtggcctccgcggcatcgggccgatacctgcgaatcatgaaacgcatacctgaaagtgtaagggaaatcaggcatacggcgcggagaacgatgtcgtcgcaatccctcgcagtctgtgagccaactcgtgagccaaccgaccaacacgacattcaggtcacgataattctgatgcgcccggtcgcatctcactgccacatcacattgtcgagatccgcaccgaatcttgtcgcgttggcttcaatcaaccaaccagttctggcgcaaacgcgattcaatggttctcctgcttgccgcgcaggaacacgatcgggatgatgatcagcggcgccgcgcatgcgcccatggccagtgaataaccgctggtgagccactggccggtctgcatgctgacgcccaaatccttggtgatgggcggcagagccgtggtgagcgccgtggccatgacggtggtggcgatgcacgagagcatgatgttgatgaagatcaacgtgcgacggtggttgctaagaggtgctgttcggtggtggttgttgtgacgtgtgtagtggtgtttggcatgattccgtttcgatttttggctctctgcggaggctcaagttccaactaaaggttttgcttatcgagctcttggtagtgctctttgatcacggtgaggatttcggcgaattgttcgcgctgctgagcggtgagcacttcgagcagtttaccggtggctccgttatcggccgcacgtcggcgcatcgcctcggccttgccctcctcggtgagcgcgaccagataggtgcgcccgtcttcgggatggggagtgcgcgcgacccatccgcgcgcctccattttgccgagcaattcgctcagcgatgccgaccgtataccgaggatcgcggcgagccggcgctggctgaccggcccgagaccactgacggtcagcaggcagcgcgactggccgctgccgtatatcagcgaatggtcgcgtcgtgtttcgcgttgatggctgatacgcgccgcatcatagaacagctccgccagcgctttgtcgttcattgtcgtgttcgtccgcctccatcgtttttgcaaggtacctaatgagtaatacaaggtaccttgacaaatgagttcaggttacggcgcattcgggcgaggctattcgtcctcgcctagcgcggcggatggggggtgagcacgctggtataggggatgtcgccggacaggacgccgtcgtagaagcgctgtttggcgtcgatgaagtcgatggaatcccgaatctccgcgagctgctcgaccagccgcgcccgcttgtcggcgagcatctgcttgcgctcggggatgctcggctcgccttcaaagcacagttcagtgtatcggcgcatttcttcgatgctcagaccgcaacggtgtaggcacagcagacctttgatccatgtgatgttgcggtcgtcgaagacgcggcggttgttggcatcccgtttgaggttcggcaccagaccggcgttgcagtagaacttcaacgtctcgtaggcgagaccggtcgcttcgcaggtctgcttcatcgtgtacatggtgcccctccttacgttcttttattatccggcagtgcttaccggtagtttctaccggtgtgtcgtgatttgaccggtagctactaccggaaaatatagtggcagtcataacacggctcccgttagagggaacaccaaccctgacatcaacgaaaggcaatacccatggagatcatcaccctgcgcaatggcgtcgacatgcccaagctcggctacggcgtcttccagatcgccaaggacgacaccgcgtgctgcgtcgccgacgccatcgaaaccggctaccgccacatcgacaccgcacagtcctacttcaacgaatccgaggtgggcgacggcatcaaggccagcggcatcgaccgaaaggagttgttcgtcaccaccaaggtctggctggaacactacggctacgagcagacgctcaaatcggtcgaggtctcgctcaggaagctcaagaccgactacatcgacctgctgctgctccaccagccgttctccgacgcgtacggctcatggcacgcgctcgagaagctctacaaggacggcgtggtgcgcgccgtcggcgtgagcaacttcttcccgtaccgtctcgcggacctcatcgcgttcaacgagatcgcgccgatggtcaaccagatcgagaccaatccgttcaaccagcaggttgacgcgcacgcctacatggcagaacacggtgtggtgcaggaggcgtgggcgccgttcggcgaaggcaagtccggcatgttcaccaatccgacgctcgtcgccatcggcgagcggcacggcaagtcacccgcccaggtgattctgcgctggctcatgcagcgcgacatcgtcgcattgccgaagtcgacgcacaaggaacgcatggtgcagaacatcgatatcttcgacttcgcgctgacggacgacgacatggcgtcgatcgccgcgctcgacacccgcaccagcctgttcttcgaccacgccacgcccgcggctgtcgaacgaatggccacgctggtcaaagagcgcgccggacgggaatgacctgccggaggcggtgcatatagctcttcgccgacggcctgaaacgtagcgacggacaggcaagcgggcatgatggaagcgatatttcgccgcatcgcggaaacgcaaacaaacaaggaggagccatggccgtcgagaacgccaaggtactgatcatcgtgaacaattggggcatcgaggaaaccgagctgacccgcccgttgcgtgacctcaaggccgcaggagccgcagtgacgctcgccgccgcgacgctcgacccgtgcgaaacagtcagccacgaccggtacgagggcgagacgctcaccccggacgcgctgctgtcagacgtcaacgccggtgattacgacctgctggtggtgcccggcggcacctgcaacgtcgaccgcatccgcgtgaacgaggacgccatcgcaatcgcgcaggaattcgcccacgaaggcaagccgatcgccgcgatctgccacggcgcatggctgctggtcaatgccggactcatcgcagggaagaccgccgccccctgccgctacattcgtgccgatatcgagaacgcgggcggccattacgtggacgagcagctgcacatcgatgacgccaacggctggcgcctcatcacttcccgcaagcccgccgacctcgactacttcgtcgacgccatcaaaaagaccctggcctgactcatccgactcgggacgggcggcggcgaagtcggatgggccatcgttccagccggcctcgccgcgcggccaggcgagcgacagcctaagccgctcaggcgatgaaacgcagatatgtgagatcgtcgaaagtcgcgcgaccctgaaaccccttggtcgaccgataccggtcaatcagatccggatcttcgctgcgaagccgctgcagctcgcgttccgattcgtcgagcgtgggccgcagcagcggatagccatcagacgcgagcaccacctcatcgccgggagagacgggcacagtgcggatggggtacgtcatgtcggtgaacccgtcgaacacgaagtagccgaacggccctcgtttgttcgcgaactgcgattgcaaccgcaggaacggcagtatcatcgcgcgcgacgggtccttcggcgccgcatcggaagccggtgcgccgaacgagccggatatcgggacgtcgggcgtgccgtcctgcatctctcgcagcgcaagcaccgtgaacgcgcgcagatcaccgagcaacacatcgacatccttggtcgtcggcgtctgcacgccattgaccatgatctggcagtccccgaacagccacgcctcatgccgccgggcgctgtataccactgcgttgacctgcagacgttccactggctcatccgcgaacacccgaattccggcctcatgcgagcggtagcgggcctggaaacattcgtcaaccgcccgctgcatctgtcgcatcgatgcatccgcaggcatgccaccgatgacgccgagcatcagatccttcgccacgacgccgccacagatgccgcacgcttttgcttgtcaccccatccacgacggccgcgaagtcatccgtgaccagcatcccgtcctcgttgagcgactggtcgttccgcttgccccggcaataccgctctatgatacgcatcatcaggcccgtgcgcattgggcgaacgcgcggtagaggatgttccgcgtcgcgtcgccgaccgacccgtccaccagtatgatgtggtggttgccgtcgtcgcgctccgtgacatcgcgttcgccggtcgatgccacggcctggcgcaaggcggccatgtccgcatcccattgcggtacgggcgtgccgaacgagcacatgtcgaacacgaatgcgcaaggggtcgggttgaaggatgacgtcgtgcgctcgctgtatcgatatgtgtacgcgctcggtgttccatacggtcggcctacgcgcatgtaatcgtcgatggcgcggttgacgcagaagtcgaattgccggaagcctgacggcaagtacacgttgtagttgttcgccgcacggtcgagtttgtctcgccattggccgtcgaacatctctcggcgactgtcctcatgagcgccggggccgagcgtgtatgatccgagtcgagacaggtattccgcctgcaccgaggcggcgagctcctgcaacgaccctgcgcccaagccgcccgccgtcgtggtgctggtgctactgtcgtccggcatcgtgcgggtcaccgtcgtcgtgccgtccttcagcgtgaccacggtggtggcgatgccggtgtccccgtcgcgcgaactggtgcgggacacgaccttgccgtcggcatcgcgccgcgacggtgaagttgcggatgccgatgcgtcgggcgccgcgccggcaccgccctgatgcgaggtggcggcccatatcgcgatggcgaccgccgcgatgatgatgacggctccgatgacgaattccatgctggttcctttaatggcgccggtggtgattgcggtgctggccgctgttgaccatcctatcgtcgccagtgggccgccgcctgaataattccgaatggaaacgcggtcccgggctgcgctaatcgccgtttgaggtgtgaaatcgggattagtgtgggcgaaattggtggtatctacatttcgaggggttgatctgatggatcaggaacatctatctgcatttcagggggttgcccaaacgcgatatccgaagtattaagcgctttttgctgctgggattgcacggttttgggagcgttcatacttggctggcaccccctcgaaacgtagatagatgtccggcgagaccgaaatcaacccctcgaaacgtagatacggttcaatgacgatgtgattccgggcttttcgcccatgaccgggggagagaagatggcgaatcgcgccggaaaggggtcgtgcccgaaccgtgatgccccgtcatgactgcaacatggtggtgccgccgtccctgacgagcagtgattgacggtcagtgagcgcgcgtaggtcgagctccgtggaataccgttcgacgatgagccgtgccgcctgacccatcgtgggattgcccagatgcggcaccacatggaaatccgtcagaccgagtcctttgtagtcgcgcagacccggggcgcgatccgtgcggtccatgatggagcagtagccgatgtccggcgacatgatgaccgaaccggctgattcgccgatatacgggatcccgtcggctatccgttcggcgagcagcgcatccgcgccggtccgccgcagttcctgcagcagaaagaacgaattgccgccgccgacatatatgcagtcggcgtccgagagggtgctccgcacgtcgggggcagcggccgttgaaacatccagttcagtgacgcggaatcccagttgacgcagttggcggcgggtcagcatcgtatgcgcgaacccccatggctctacagccgcggcggtcgtgatgtacgccagtcgaccgccgtgcagcccgggcagtgcatgcgggatcatccctgtggctccgcgcagcgtcgatgtgagcatcatggtcgccatcctggcctcctttcgtatcgcccagtataggaccgcgttcatgagagcgctgacagatgaaagatcgaatgcgcgcggtggcgtttggcgctcgcctggcccggttgccggaaatgacgacatgggcgcgaacgattccgccgatgcggacggaaaatgccataactcgaacgaagacgatacgattggacgcatgagcgaaacgaacaatgacaacctgtggccggccccgaccgctgacggcccgctgaacgcgaccgtgaccatccccggcagcaaatccctgtcgaatcggtacctgatcctcgccgtgcttggcgcgaagcccgtcacgcttgtcgggctgttgcgctcgcgcgacaccgaactgatgatgggagcgctgtcggcgcttggtgtgcgctgcgacatcgacccggaaaacgacaccacggtcacggtgacgccgccggaatccggccgattcagcggcaatgtgggcgtgtactgcgggctcgccggcacggtgatgcgtttcgtgccggggctggcgctgttcgcggacgccccggtgcggttcgatggagacgatcaggcatacgcgaggccgatgcagccggttctcgacgggctcgaacagcttggcgcccgcgtcgaataccacggcgagcacggccggctgccgttcaccatcacgccaccgcgtcatgatggtgaacaggccgatgacggttccgctgccgccaaggtgagcatcgactcgtccggctcttcacagttcatctccggtctgctgctgatcgggtcgcgcctgcccggtgggctggagttgcggcatacgggggagaagacgccgagcctgccgcatatccgcatgaccgtcgctgatgtgaacggcgcgggcggcaatgcgaccgctgatgaggagtctcgcgtctggcgagtcggccatgccgcgttgcagctgccggaacgcgtggtcgtcgaacctgacctgtcgaatgcggcgccgttcctcggtgcggctttgattgccggaggcacggtgcgcgtgccgcactggcctgttgagaccacccagcccggtggactgctgccgggatatctggaacgcatgggcgcgcgcgtctcgttccccgaagaggacggcgtgcggtattgcgaggtgagtggcgacggccatgtgcatggtcttggtgatttcgacctgaccgcggcaggggagatcgcgccgtcgctcgcggcgatactggcgtttgccgatgctccgacccgtatgctcggcatcggtcatctgcgtggtcatgagacaaaccgtctggaggcgctggtcacggagatcacgcgcatcgggggagaggcccgcgaactggaggatggcatcgagatcactcctgtgccggttgagcgtctgcacggtgaggtgatggaatcctacgctgatcaccgcatagcgacgttcgccgcgatgatcgggctggccgtgccgggcgtccgaatcgtcaatgtggagaccacgcgcaagacactgcccgatttcgtgggcatgtggaccggcatgttggagcggtgaccgcgacgaatatcacggatatacgatgaggggctgattcccagcggaatcagcccctcatttatgttcgtccgtttgcgttagacggactgcggcctgctaacggcagttcgtcacttggtgaacgtgttgccgtaagtgtccgcgccgttctcggcgatttcggcggacttgcgggcgatggccagctcctcgttcgtcgggatgacggcgatgatcacggaggagtccggggtggagatgatgcgcggctccttggagcgcttcgcgttcttctcctcgtccagcttgacgccgaacggggcgagcttgtcgcacaccatcttgcgcacgatgtcgtcgttctcgccgacgccggcggtgaaggtgattacgtcgcagccgcccatctggtaggtgtagttgccgatgtagctgacgatgcggtgcacgtacacgtcgagggccagcttggcgtcctcgttgccttcggccaccagacggtgaacctcgcgcaggtcgccgaagccggtcatgcccatcatgccggagcgcttgttgaacagggtgtcgagctcgtccacgttcatgtgggcgttgcggatgaggtggaagaccacggccgggtcgatgtcgccggtgcgaccgcccatcatcaggccttcaagcggggtcagacccatggaggtctcgactggcttgccggaaacctcggcggaggcggaggctccgttgccgatgtgcagcacgatctgcttgaggccttcggccggcttgccgatgacgccggggaccacggaggagatgaactcgtgcgaggtgccgtgggcgccgtaacggcggatgtggtactggtcggcaatctccttgttcagcgcgtaggtgctggccgccttcggcagctggaagaagaaggaggaatcgaacacgaagatctgcggaacgtcgggcagcagcgcgcgcatgacttcggcgcccttggcctccgggccgttgtgcagcggggcgagcacggccaggtccttgacggcgttgatggtcttgtcggtcacgagggccggcttcgggaagagggatccgccctgaaccacacggtggccgacggcgacgatgcctgcttcggacagatccgggccgtactccttgaagaagccgagcacgcgcctgaggccctgctcgtggtcgtggatcggctcttcgagctcgtgcttctcgccgttgtactcgtgcttgtagtgaccgtcgaccggttcgccgatcttctcgacgagaccggaggccagaccttcgccggactcaagatcgaccagctgatacttgatagagctggaaccggaattgatgacaaggacggttttcgccattgtgggcatcctccatgattgatacgtaccgcgaaacacggctttccacctgatagattactcgctgcttgctacaaatcagcgccgcaggtttcgccgagagccaccaaagagaaaagccccgctgacgggctgagccgtgaagtaaacagcggggctggttataggtgaagagcgaacgacagattgcacgtgcccccgctggcgggggctgtcgcgaagcgactgggggtggtcgtaaagagcggctgtaccgcgtggagaccgctaaaacacccgcgtcactgggcctcgatggcggtcaatgcgatggtgttgatgatgtcctgcaccgtcgcaccgcgtgagaggtcgttgacgggcttgttgaggccctgcagcacggggccgatggcgagcgccccggaggaacgctgcacggccttgtagccgatgttgccggagcacaggtcggggaacacgaacacgttgacgtgtccggccacgtcgttgcccttggccttggtggctgccacgtcgggcgaccatgcggcgtcgaactggatggagccgacgacgggcaggtccggagccttctccttgacgattcgcgtggcctcttcgacgatgtccacgtccggccccttgccggagccgagggtggagtaggagagcatgccgaccttgggctcgatgccgaacgccttggcggtcacggcggactgcagcgcgatctccgcgagctgttcggcgtccgggttgaggttgatggcgcagtcggagaacacggtcacgtggtccttgaagcacatcaggaaggcgccggagacgagcctctgcccgggcttggtcttgatgacctgcagcgccggacgcacggtgtttgcggtggagttgaccgcgccggacaccagaccgtcggcgtaaccgagcacgacgagcatcgtgccgaaatagctcgcgtcggtcagctgcttgcgggcctgctcttcggtcatgcccttcttggcgcgcagctcgcacagcttggcgaccatgggcttgaggatgttctcgtcgtccatggcctggaagcgcgccttgcccagatgggtcagaccgagttccgcgccccgggcgaggatcgcgcccttgtcgcccacgatgatgaggttcgcgatctcgcgctccagcaggtagtcggccgccttgatgatgcggtcctcttcgccttcgggcagcacgatcgttttcttgttcgccttggcgcggccgagcaggctgtactggaaggcgtacgaggtgatcgggaagtcgatctcgacgttgatggcccgcaggacctcttcggtcggcacgttcgcctggaaggcggcgagggccgcatcggcctgtgacgcctcggtgaacgggatctgggggatcgtccacaccggcagcccgaaatccgcgagcgtgtccttgaccgagacggagtggcgcggctcgcagcccgtcacgaagatgcccagcaccttgttgccggcggcctccatgccttcgatggagagacggacggtgtccttgagctcgtcaggccaacggtcgatggtgcacacggcgaggaagacgccggcctgcaggtcggcggcgatgttcgcgttgaactcgtaggcggttgggtcgttgacgtgtgacttgtcggtgccgacgatgagcgccgcgtccgcgcgggacacgttcatcgcgtcgttgaacgccgcgacgatgtcgccgcgggagccttccttgtctttgcgcacctggtgaatgtccagtccggtggacagcgcgacgccgaggccggcgttggaggcgttcagcaggatgggggtgaagtggtcgtgattggagaccgcggggcggaatacggcggtcttgaatttggtggtcagcgccttgagcacgccgtatgccacgacgttgcgtccgtttgcgccttcaggacttgcgatgtagatgttcgttgttgtcacgtttgtctcctcgtcggggatggtactgctcgtgtgaccgccttgtttcacacttactgacattgtagtacccgatcgttcgctgccgggcgttgacatggcggtaaatgcggccgggacggttcgaccgggcgcgtggtgacgatgtagtcgttgcgcccgtatccgtcgtcggagacgatgtgctcgatgtcgtgggggtagcctgcgatggggtagtgcaggtagcaggtgatgccgagctggtcgaggcgccggcgataggcgtccgcggccggctgccccgcgtactgggtgagcacgacggagccgacgtggaatccgcgcgagcggaagatgtcgatgaggcgcagcacgtcctcgtcgtacgtgatgccgaggtcgccgcgcatcttggacttctcgatgtggttggcgttgatggcgatgacgatctccgcgtcgtcggcgaggcttttgagcatgcggaatttggaatccggctcgaagccgggcagcacgcgtgacgcgtgatagtcatcgaacagcttgccgccgaactccagatagagcttgccgccgaactgcgcgatgcgctttcgaatgttggcggcctgcagctcgatatatttctcgttgtcggatccctgtcgcatgtgcagtgagagtcccgtccgaacggagcgctgtacatgcacgattataccgggttctttacgaggaccacccccagtcgcgaagcggctggggtcttacaagaatctacgagtgaaattcggcgatgtgtgcggtagcatggcgcgggaagcgaaggcgtacaagggtacgtcgagcttcccgtaacgcagctaacgcacacatcgtcgaagtccaccggtgaattggaataacgtgtgtggcctctaggcgcaccgaaggaagctgtacaaaggtaccgcgactgaggagcaacgacgaggacactccgttattccaaattcactcccattcgatggcttcagttctgccgtcacgtcattccagttgcacccagttttcggcgccgtctcgagccgagtgccgccaagtaacaccgtgtcgtgtttcgtcggcctcggggacaaaagtggggacaacttttttcaaactcagggctttgagtttttgtttttgtcccaaagcgcgcggcggaccgcctttggaagctcgatagcgccgaaaacgcccgttttgaaactcaaccgtcccgtaggacgggctttgagattccgctgacgtccggaaacgcttcgagctcccttgaattttcagacagcacatggtataaggtaattggttttccgttaggaaggcttccaagtgccggggacgttttccccggctttttttatccaggagaacaatgcgagaactcagcgtcttcgtcgacgagtcgggaagtgacggcctctccgaccgccactacctgctcaccgtcgtcatgcacgaccaatccgagagcatcgcggattcgatcgcggcatatgagggcgcccttcgcgccaaggggctcccggacatacccttccatgcgtcgccgctcatgaacggcaaggaccagtactcggggctcgacttgaggacgcgcaagatgttgctcggctcgttccgagtcttcttccgccacatgcccgtgaggtaccacacctttgcatacgtgaccaaacagttcgcctcgctcgacaagctcgcggggacgatgcgaagggacctcgtgaacttcctcttcgacaacctcgcggagctgcaatcctacgatatggtcaaggtctactacgacaacggccagcattctatcgccgagtcgctccatcgcgcggtcgagtacgcgctctcgaaggacgccgtcgtctaccgatcggcgcagccctccgagtaccggctttcgcaggcggcggactacatctgcaccatggaactcacggcgatcaaatacgcggagcatacagccaccgcgacggacgagaagttcttcggcaaatggtccgatttcaagaagggcatatttaaggagacacgcaagaagtttctctagaaaggcggctcgccatcggggaacggtttccgacagggggctcgctgcgcgggaggggcccttggcggcatcgctgtgggtaagtactgggagctcgaggagataaccgccgaagaggctacagcgatcatcggaaagcgcgaagaagaaatggccccaaaggaagaaacccaagaatccgagaagcgcccccaaatgggagcgcttcttcggagacgctagctcgccttgccgtcagataccccgggcaaacccagctacggccttttcggcacgtgcagcagcttagccccgcaggaagagcagaacgctgcttcaccggacgccttgacaccgcaataggggcagaaagccgcgcgcactatgcggtccgtcggcgtccaagacctaatcctcttggcgatcggtctgccacgcgttcggctatgcccgagccgtcgttagagctcgctacggtgtagtcgctcgtgaggtggcccttgtagtcgaagtcgatcacgaacttccacgaactgatgccgctgagcgaagcgacggtcccgtaaaccttgtgcccgttcacggaaagggactcgagccttttgacggatcaccccgtagcctcgacgatctcctcgaacccctcctgggtcacatcgttcctgaaacactcgctcgcacggtcccactcggcttttgccttgaccttctcgagctcgatcttccgcttatcctgcctatcgcatgcgaacagtatgatgccgagaaaagcaaaagcgggaaatagggtcgtcaggatgttgtccaaagtttccattcaaggtccccctaaacaagcccagcgccgtgggcaagaagaaacagcgcgacgtggaggatgatgaaggcaggcagccccgccgcgaaataccacttggacgtcttatggtgggcgacgcgcatcccggcgatgcctccaagggcccctcccgcgagcgagagaccaagcaaggtggattcggggaccctgctgccgcggtcaatcgccctcttcttgtccaggcagaaaacggcgaacgtgatgacgttgatggcgagaaggtatgcaccgagagcgacgatgacgggcgcgttgaacgaagcgcccggttccagatcgacgacgatgacgccggcccaaacgagcacgacaagcacccacacaatcaagaagactatggcgctgaaccaccaggcgatgttgtgcttgttcatgtggttcctggtgaagatcataagggcaaggagcatccccagggcgccgcccgctacggcgaacagggtcaagatcctgccgtccatgaggccggtatcctcgtcctggttgtaacgggctatcgcgtagtcgatcgcgaagagaatgaacgtgaggacattaatgcccacaagatagataacgaaggggtgaacgccctggacagcaccgcccagggcagatagtgcctgctccataagaagaactccttcccgaacaacatgccgccattatacaggtagattgaacgcccgatgcgcctgttcccattgatgcttcgggtatggcgagaagagcctttccgcggcccaaaccgcatggccagccgcaggccccgcgctaacctctgccccaaccccgctccgccgcgcagcagcatgccgtcgttcagccccggggccgtcccgcgatcctcgcgcaaccgcgcgaactcgacggaggatgtcatgttcgattcaggcaccgccagaaagctgctcctagaagtatccggcactcatgccaagtacgttgacaaaaggttcggccacgacctcaagttatgccacatcgatgagagcgacgaaagaaacgtcatcggatacgcctgcgtaagcgtaataccgtcgccaacttttttcaggtggctattcgggatgggtggcgcagtgaggttggcgaagcctaatgggaaacggtggatcgagagcttcccgaatgctgtcgccaccgatagcgaatcctatatccgaattatcacacaaaacttaaatagtgtaaacacaccttaaaaaaaggaaacggaaaactctcttcaagaacgaactattgacgatgcgcatgaagccgataaatctcgtcgccatgcttttacgcgcaagacaatcaagcgctgcgaaaggtgcggtagcgaattagagagcacgcgaaagtccaatctatgcgaagcctgcgagaggggacagctgcaaaataatgtcaagaaaggtgcggctgttgcatccgctattggcttggccaaagtagtcgccccatatgtcaagaaggcggttccagtcatggcacgggctgcgaagaagattgtgcttgctgatttcgattaactttgatagcttagaggtatcggcagaagggagacctcatgtctgcgaagaagatttcaatcataggagccgttgtggtagccctcgctatcataggcggcgcatgcgggtggtggtttggatacgaagctccgcaccgtgaggccttggcatcatatgagaacgctgtttctatggtgaattccaagaacaagaaactagacgattctttggctaagctgacggagctgattgattccaaggatgagactttggatcctcagaccaagaaggacgcttcggaagtcgcaaaatctgcgaagagggaacgtcgcgcggtagggaaacagcctaagaagaccgatgaacttaaccagaaagcttcggatctttccaagccgctggattatactgcaaccattgccaaaatcgacgaggctgcaacgaacgtagagaatggtatcaaacagctcaagcaggtcactgagccttcgcaagattttgtcatggctagattgaaggaagttcccggaatcctcaatatggcaccggtcactgaggacaatgacccgaacggcaatctcaacaaggcaggtggatatacgtccactgtttactttgaatctcagaatgtcgatcaatcgacggtctacggtaatgaccttatcgacaaaggaaccgatgcaggcggtgccattgagacgtataagactaatgaagatgtgacgaaacgtgatacctatctcggtgcgctggatggtggcatcctttcgtctggatctcataaagtcattggcactgtcttgatacgcacatccaatgagctcactgcgactcagcagaatgaactcacgcaagctatcattaacgctttgacgcgattggagtagcccaaaaagattgatactgatgagaggccgttggcgtctttgaaccgcaccccgattgttggactgaagaaattcagattcgatgatcggaggtgcggttctttcgtatgcgtgaggatcgaaggaaacactacgacgacgggttccggcgcgaggcgctggaactcatcaaggccggagccggcgggaacacgctcgccagacggcttgccatgcccaggaggaccgcggaaaaatggatcatgctgtacaggtccggcggtgaggaggcggtcatgggaggcaacggcagcagacgctacgactgggagacgaaggtcgccgcggcgcgcgaccgcgtcgagaacggcatgaccaagacggaggtcatggcgaagtacgcgatcgcgagcatcgcgccgttggaacgatggtgccgcgagtaccgggcgggaggcccggaggcgctcagaccgaggcccaagggcaggcccaaaggctcgaagtccaggccgaaacccgaaccgacgcgcgagcaggagctcgccgaacaggtcgcctacctcgaggcgaaggtcgcgtacctggaaaaactccgggccctgcgggcggacaagtcacgcggcgcgagaaaagcgccgtcgtccgactgctcgcagggcgggggcaccggcttgaccagctcctgaggatagcgggactggccagatccacgtacttctatcacctgtcgcatccggagcgtgtgacgcgggccgatctcgagccattggtcggcgagatctggggacgcacgccgaacgggtgcggccaccggcaggtgcgcatgtgcctggtccacgagttcgggcaacgagtgtcggccaagagcgtgctcagggtcatgcggcgcatgggactgagatgcgccatccgctccaggaacccatggaaacgctacgactcgtacaggggcgagacgggcgatcacgtgcataacctgctcagacgcgacttcgacgcggcccgtccgttctccaagctcggcaccgacgtcaccgaattcaaggtcgcgggctccaaggcgtacctcgctcccgtgtacgacatggccagcaaggagatcgtcgcctgggacgtgagccgcagtccggacctcgggcagcagaagcgcctgctcgccatgctcgcggagcgcctgcccgccggcgcggagccgatcctgcactcggacatgggatggcagtaccagcaccaatggtggcgggacgagctcgaacgcctcggcatccgccagtccatgagccgcaagggcaactgcctggacaacgcggcgaccgagcaggtgttcggccacctgaaggacgagttctaccgcggccgcgagttcgactcgtacgagcggttcaaacgcgagctggacgcctacatcatccattggaacaccagacggcgccagatacgactcgagggacgcagcccggaggagttccggagcatgtccctcgcggtctagggctgtatcctaattaacaacgtccaacaaacggggcgcagttcatttctcgagggcttgttttgggaggagagcttctgtccgcacagcttgttgagaagagcgacggcctcggagacgatcttctctttgctcagcccgaagacatcgatgcccacagaagccagagcattcctcttctctgcactgccgcagtcgaggctggctcgctcggcgttgctcaggggaacagcgaaagttgcccgtggctcgcccgcgctccttcacttggctctcctggccgtcttgcatcgcctcgccagcgattgccaccgatcccttgtcaatggatccgagaatgcccacgtccgctcctttcgcttgtccatattctccaattaatcgggcacggcatccatccccgtactcttcaccagctcttcccgcaccacttcgcgcagcactccgcatggttcatgggcccggcgttcacctcgtccatatcctggcacttctcgctcgcctagagggcaagtgatcgcgaacgcatcgctttggctttgcgccaaaaaggctcgacgtctccggatctgaggcaccgggactcctacgcagcacaaccaaggacggaaaaaccgtgtccaaaatgatcaagatagccaacggtcgagagggctacgtacggacttgcgaatacaatggcaattacgttcttcttatgggcataggcttagacattttttggtcagcgcccacccattgagaagcaggaaggcgcaataatgaaaactctcaagatttcactcgatttcctggccggccctttgtggaaggacgagttcatcgacggcgagctccgaaccggcattcccgtgattgacaatgacaaggctttgcaaaccctcaatgaccaaatttgcgagctgtactcgtcttgctacgagttcgactcgcatgacctgctctgctggttcaacgaggagaaggaaaaggccgacaagccccgcatgctcgagctgctgggcaagctcaacgcccgcatcgcagagctgaacgacggctccttcgtcgtggacgaccaggagacgtcgcgcgtcgaggcgctgtagtcggcagatagcccgaacgtcgaaatggcccgcgctccactcagagcgcgggctttcttatcgtttagccgtcaaatcagtttcctgttctcatcgtccaggcagtccttctcgtaagctccaatggctagaacgtactgcgaaacaatggcaatcagttccaggattcctgatcagccctcggggacaaaaactgcgcgtccactcacttgggatgactcctcactcccattcctccgaataccgccccgtactttgctgttttgaaacacggggagtaaatggcgaaatcgcaggtgaaggggagtaaaacggcaaagaaaaaagcctccgtcccaacgtgggaacggaggctcgattgccgtatttattcatcgccgtcgctggcggctttgccgtgagtcgcatacgaaacgaaactcagcggcatagtgcggcactcgaaagcgcaggtcaaagccctatcggctcactcccactcgatcgttgccggcggcttggacgtgcagtcgagtaccacgcggttgatctggcggcactcgttggtgatgcgggtggagatggtggcgagcacgtcgtagggcacgcgcgaccagtcggcggtcatggcgtcctccgagctgaccggtcgcaggacgatgggggagccgtaggtgcgctcgtcgccttggacgcccaccgagtgaacgtcggcgagcagtacgaccgggcactgccagatgtcgcggtcgaggccggcgcgggagagctcttcgcgggcgatggcgtcggcctcgcgcagcaggtcgaggcgttccctggtgatttcgccgatgatgcggatgcccaggcccggaccggggaagggctggcgccagacgatctcgtcaggcaggccgagctcggtgccgatggcgcgcacctcgtccttgaagagggtgcgcagcggttcgatgagctggaacttgatgtccttggggagcccgccgacgttatggtgggacttgatgttggccgcgccgtcgccgccgccggattcgacgacgtcggggtagagggtgccctgcacgaggaacttgacttccttgccgcgggcgccggcctcttcgaggacctgacgctgggctttctcgaaggtgcggatgaacttctcgccgatgatcttgcgcttgcgctcgggctcggagacgcccttgagcgcttcgaggaagtcgtcggcggcgtcgacggtgatcagtcggatgccggtggcggcgacgaagtcgtgcttgacctgctcgacctcgcctttgcgcagcaggccgtggtcgacgaacacgcaggtgagctggtcgccgatggccttgtggacgagggcggcggcgactgcggagtcgacaccgccggacaggccgcagatcacttcggcgtcgccgaccttctcgcggatcttggcgacctggtcctcgatgatggaggaggcgtcccagttgtcgggcaggccggcgcactggtggaggaacgtctcgatgagcttctggccgaggggggtgtgcctgacctcggggtgccactgcacgccgtagagcttgcgggactcgtcctgcatggcggcgacgggcgcgccctcggtgtgggcgagcacttcgaagccggcgggcgcggtcttgacggcgacgccgtggctcatccacgtgtcctgctcggccggggagccggcgagcagcccgtccgtcttgtcgatggtcgtgtcggtcttgccgtattcgccgagcgcggccttgtcgacgtcggcgccgagcgcgtacgccatggcctggaagccgtagcagatgccgagcacgggcacgccggcgtcgaacagcttgggatcgacgcgcggggcaccgggctcgaatacggatgcggggccgcctgacaggatgatggcctgcgggtccttggcgagcatctcgtctaccggcatggaatgggggacaagctccgaatacacgttcgcctcgcgcacgcgacgggcgatgagctgcgcgtattgggcgccgaaatcgacgacaagcaccgggccgttagccatgggactcccttcatgcggccgcgcgcgatagcggatacataggtatgggcgatatcgttgattgcggccattggtattgtgtggacttcttacagtatgtcacatcaattgtggcgattcgagccgacattggcgtgtgtgatgggcgggtgtcgtccgggagcgacgcaccgtttcacaaaaccgaacaattaacgctgttaatatgaacaacacgccgcatgttctgttgcctgcatgaacacgcggcgtgccggtagatcgctgaaatcgttggaaaataagagtttctcattggatggagccgtaatataacctgtgaggacgccggttattcactcataattcatacaattaatctaacattttcgaacacacatgcaaaaaagctgccaaaagtcttgctctcaacgtaccatgatgaacgattgggattgggcaaccgcgaaatcgcaaggcttcgcgagagtccatgaccgaacgataatgatcaattgcacatcactgtgcaggagtacaggagtacacatgacgagtcctgttattggcaccccttggaagaagctgaacgctccggtttccgaggaagctcttgaaggcgtggacaagtactggcgcgttgccaactacctttccatcggccagatctatctgcggagcaacccgctgatgaaggaacccttcacccgtgaagacgtgaagcaccgtctggtggggcactggggcaccacccctggcctgaacttcctcatcggccacatcaaccgcttcatcgctgaccacggccagaacaccgtgttcatcatgggcccgggccacggtggccccgccggtacctcccagtcctacctggacggcacctacaccgagacgtaccccaacattaccaaggatgaggctggcctgcagaagttcttccgccagttctcctacccgggcggcatcccctcccacttcgctccggaaaccccgggctccatccacgagggtggcgagctgggttacgccctgtcccacgcttatggcgcgatcatggacaacccgagcctgttcgttccctgcatcgtcggcgatggtgaggccgagaccggcccgctggccaccggctggcagtccaacaagctcgtgaacccgcgcaccgacggtatcgtgctgccgatcctgcaccttaacggctacaagatcgccaacccgaccatcctgtcgcgcatctccgacgaagagctccacgagttcttccacggcatgggctacgagccctacgagttcgtcgccggcttcgacgatgaggaccacatgtccatccaccgtcgcttcgccgagctgttcgagtccgtgtgggacgagatctgcgacatcaaggccgcggcgaacacggacaacatgcaccgtccgttctacccgatgatcatcttccgcaccccgaagggctggacctgcccgaagtacatcgacggcaagaagaccgagggctcctggcgcgcccaccaggtgccgctggcttccgcccgcgacaccgaggcccacttcgaggtcctcaagaactggctggagtcctacaagccggaagagctgttcgatgccaacggcgccgtcaaggacgacgtcctggccttcatgccgaagggcgagctgcgcatcggcgccaacccgaacgccaacggtggcgtgatccgcaaggatctcgtgctgccggcgctcgaggactacgaggtcaaggaagtcaaggagttcggacacggctggggtcagctcgaggccacccgtcgtctgggcgtctacacccgcgacatcatcaagaacaacatgcacgacttccgcatcttcggaccggatgagaccgcttccaaccgtctgcaggcttcctacgaggtcaccaacaagcagtgggacgccggctacatctccgacgaggttgacgagcacatgcacgtttccggccaggtcgtcgagcagctgtccgagcaccagatggaaggcttcctcgaggcctacctgctgaccggtcgtcacggcatctggagctcctacgagtcctttgtgcacgtgatcgactccatgctgaaccagcacgccaagtggcttgaggctaccgtccgcgagattccgtggcgcaagccgatcgcctccatgaacctgctggtctcctcgcacgtgtggcgtcaggatcacaacggtttctcgcaccaggacccgggtgtcacctccgtcctgctgaacaagtgcttccacaacgatcacgtcatcggcatctacttcgcgaccgacgcgaacatgctgctggccatcgccgagaagtgctacaagtccaccaacaagatcaacgccatcatcgccggcaagcagccggccgccacctggctgaccttggacgaggctcgtgccgagctcgccaagggtgccgccgcttgggattgggcttccaccgcgaagaccaacgatgagtctcaggtcgtgctcgccgccgccggcgacgtcccgacccaggagatcatggccgcttccgacaagttgaaggccctgggcatcaagttcaaggtcgtcaacgtggctgatctgctctccctgcagtctgccaaggagaacgacgaagcgctgaccgacgaggagttcgccgacatcttcaccgccgacaagccggtgctgttcgcgtaccactcctacgcccacgacgtgcgtggcctgatctacgatcgcccgaaccacgacaacttcaacgtccacggctacgaggaggagggctccaccaccaccccgtacgacatggttcgcgtgaacgagctggatcgctacgagctgaccgccgaagccctgcgcatgatcgacgccgacaagtacgccgacgagatccagaagctggaggacttccgtcaggaagcgttccagttcgcggtcgacaagggctacgaccacccggactacaccgactgggtgtactcgggcgtcaagaccgacaagaagggcgccgtcaccgccaccgccgccaccgctggcgacaacgagtgatgatcgcctgattcttgtcaggatctgagttgaaagggcttccggagcactccggaagcccttttttcgtcaggctccaccaagcgacaatatcgctcgtgagaatggtcatcgcctacaaaccgacaagtcgtcatgacacgacgggtaaatccacactacgtagtcatctccatatataatcaagacgtccgctgaatgcgacccaccgcatgacggtccctcgaagaagaaggtgatgactctcttggatgtatcattctcatatttcatccaacaggtatgttcgaatccggcgctggccatcaccacgttgctgacgctcggcgtcattttcgtgaacggctggaccgacgcccccaacgccatcgccacctgcgtcaccaccagatgcctacgtatccgtccggcggtgatcatggccgcggtgctcaatttcttcggtgtgttcatcatgacgcagctgaacgcctcggtggcgtccaccatcagcaacatggtcgatttcggcggcgacacgaacgccgcgctgatcgcgttgtgcgcggcgctgttctccatcgttgtctacagtgtgggcgcgtcgctgctgggcatccccacgtccgagagccacagcctaatcgccggcctttccggcgccgccatcgccatccaggatggcatcggcggcatcaacatgggggagtgggtcaaagtgctgtatggtctcgcggccagcctcctgctcggatttggtatcggctggatcgtgtgcaagctggtgacgctgatctgcgcggggcttgaccgcaggcgcgccaacgtattcttcaggtatgcgcagatagtcggggccgcggccatgagtttcatgcacggcgcacaggatggccagaaattcatcggcgtcctgttcctcggcatggcgttctgcagcgggcagaccggtgtcgcaggcgtgatcatcccagtgtggctgatgatcctgtgcagcacgatcatgggtgtcggcaccagcgtgggaggggagcgcatcatcaaatccgtcgggcaggacatggtccggctggagaaataccaaggcttttccgcggacctgtccagtgcgctgtgcctgctggtgatgaccgtgctcggcatccccgtttccaccacgcacaccaagaccagcgccatcatgggcgtcggagcggtgcgcaggctgtccgcgatcaacttcggcgtcgtgcgcgacatgatgctcacctgggtgttcacgttccccggctgcggcatcatcagctacgtcatggcaaaactgttcatgctggtgttctgacaccgctccggcacacggcatcagtcatcgtttcaagaaaggatcagcatatggcgaggaaaaacgattcgttctatttcgacggattcaagcagagcgccgattatgcatgccaggcggcacatctgctgtcggaagtcatgcaccattacgaaccggatcgtctgctggaacgattcgacgagatgcatcgcatcgaacaggcggcggacgaggtccgtcacggcatgatggacgagctggtcaccgcattcatcaccccgttcgaccgggacgacatcgcgcggctgagcagcgtgctcgatgacgtcaccgaccgcatcgaaggcgccctgcaccgcatgtattacgacaacgtgctggagatccgacccgatgcgctggacctggtcgacatggtcgagcgttcatgcgggaagatgtcggagctgatcggcgagctgccccggttcaagcggtcgaagaccctgcgcgagcaggtgttcttcatcaacaagatcgagcaggacgcggaccgcctgttcgtagaggcgatgcgccgcctgcacaccacctgcaccgacccgctgcaggtgctcgcctggcacgaggtgtacgtgcatctggagctgtgcaccgacgattgcgagcatgtcgccgatgtcgtcgacaacatcgtcatggagaacagctgagagcggttcccccccccgtcccggccacggcgttggacgggaatgccgcctaacggtgggtgttgaaccacgcgatggcgagctgggtgcggttggtcagagcaagcttgtcgagcatcgcgctgatgcggttgcgcacggtgccctcgctcagatacagtctggcggcgatgtcgcggttgtcgagtccctcggcgacgagcgccgcgatgtcacgctctcgttcgttcagcagctgatcgatgccatcagacgtacgacggccgtgcgggatgccgtcgccggccgtgtccgaggcgtcgtccggccccttgcatccggcaccggccgtcggcccggtgagtttgccgatcacgtcggcgccgagcaccacctgaccggccatcaccgcatgcagggcgggtgcgatcgccgccacatcctgcttgatgagatagcctttcgtcccgagccgcatcgcctgctcgatataggcctggtcagagaacgtggtcaggaacaggatacgtgccgccggatccttcgtcaggatctcccgcgcggcatccagcccgttcatgccgggcatctgtatgtcgatgagcaggatatccggatgattctccggcgactcgaaatgcctgcgaatcgccgcgccgccatcgttggcgctccatagcacgtcggcggtgccggtggcggtcaggatcgtctccagcgactggcagacgatcgggtcgtcgtccacgatcgcgattctcatagcttccccctgttccctgatgtgccggcagtcgtcttcatgaatgccggctggtctgttttcgcgcaagatcccggggatgcatgccaacgttgcttcggcacggacacgaacacgcgccatccgccatcatacgggccgtacagggcggttccgccgattgagcgcacgcgcgattcgatgtcggtgagtcccatgccgcgaggcggctccccgtccgtccggcgccgcccgcgggcatcacgggcgcggatcgcgggccctggatcctggacgaccaactgccacaatgtcggaaaatcacgcagcgtcacgctcgcctcatgggcctcgctatgatgcgcgacgtttgccagcgcctcgcgaatcaccgtcgcgaagcagcgtgacaccggggccggggccgtgtcgacgtcgttcgccaacgacaccgagaagtccggggagataccgtcgaatgaggcgacggcggcttcgatctgcgcggcgaaatcggtgccatcatcctcaaggtcatgtaccgagcggcgcaccatcgtcatcgcatcgtccaaggtctcgcccagcgtggtgaatccacgggccgcgacctcgtcatcggtcgcctcggccacggccctgccggcctgcgcctgcatgatcgcacgagtcagcaggtaccccacattgtcgtggatctcgcgggcgatacgcgtgcgttcgccgagcgtcgccatgcggaccgactgcgcgcgctcctcatcgatatcggcgatgcgcgagcggacggaacgggaggcttcacgggccatatcctgagcgtgcaacagcgcacgtcgattcccatccgaagcctcgcgggaccgtcccgcgacgaatccgagcaacgcggtcaacgtaagagccagcgcctgcatatggctgttggcatctgcggcttcggccgcgacaccggcatgtgacacgcggacgaaccacagcgccgcaaacggcaacacccatagccagcgcacggccgtcaccagccgcgaagggcgccctgcggcagccagacgcgccatatcgtaggcgacaagcggcatgaacgagcaccatgcgggcactgccgcggcgacgatcagatacgccacgcaaggcaaccacggccatcgttcatcggcatgcagccattcgaccagtccggtgacggagacggccagcagaagccccgcgatgaacacggcatcggtgcggatcccggtcatcacggcgagcacggtgcccaacgcgagcagaacaccctcctcggccaacacgcgcatggcacctcccggatcgtcattcgtttcaataccagtctagcggtggaaggaactccacgaacatgccgatcgtggcggataatccgcgtggcggctccctgacggtgggtctgttctccaaccgaaccatcaacatcggcatcgtgaccgagatcgtgctgctcgtgctcatcaccgaagtgccggtattgcagaccgtgttccacaccgcgcccctgggctgggacgactgcgtatacctgtgctgcatcccgttcgtgatcctcggcatagaggaactgcgcaaactcatctggcggcattctttcccaaccgagcgggtatagcgtgctccgccccccccgctggcgggggcaagtggcgccgcgagatgatgacaaatgtcacgggtgcgcggccaagtcgtgacgtttgcaggtggcgatcgccgacactttcttgggatgatgtaatcatcaaagaaaggagcggctatggcaaccgacaacacagcccccggacgcgatgtggcacccgacgcagtaccggccgtgcatgtcagtcaactggtcaaacgctacggtgacatggtggcgctcgactatttcgacctcgacgtgacgcaaggcgagatcttcggcctgctcgggccgaacggctccggcaagaccacggcgatcaactgcatcctcgcgctgctcacctacgattcgggcacgatccgcgtattcggccagccgatgacgccgacctcatacgcgctgaaacggcgcatcggcatcgtgccgcagaacgtggccgtattcaacgaactgaccgtcacggaaaacatcgactacttctgctcgctgtacgtgcttggcaaagccgaccgcgcaccgctggtcgaggaggcgatcgaattcgtcggattgcaggatttccgcaaattccgacccggaaagctttccggcggccttctgcggcgtctcaacatcgcctgcggcatcgcgcacaagcctgacctgatctttttcgacgagccgaccgtggccgtcgacccgcagagccgcaattcgattctggaaggcatccagcggctcaaccaggccggcgccacagtgatctacaccagccattacatggaggaggtcgagcagatctgcgaccgcatcctcatcatggaccacggccggcacctggcgctcggcacctccgacgaacttaagagcatgatcgataccggcgagcgcatcaccatcgaaacgctcgatctggcggattcggcgatggccgaggtccgtgcgctgccgtgcgtgatcgaagccaactacgacggcaaggaactcgacgtgcgatgccgtcgcggcgaacacaacctgaccgacgtgctcgacgcggtgaaacgctccggcgccaacatcggccacctgaccagtcgtccgcccaccctcaacgacgtgttcctcgaactcaccggcaaggcactgagggactgaccatcttgcccctgctggcggggctcccgcgaagcgagtgggggtggccttgcaacaaccaccctcagtcggcttcgccgacagctcccgccagcgggagcaggtaaggagacatcatgtggaccacatttttggtcgcattgaaagcgaacctgcgcaatcgtcaggcactgttctggatgattgtgtttccgatcgtgctggcaaccatgttcaacgggttcttcggcggactgtccgagggatacgagctcaaaccgataccaatggccgtcgtcgaagatagccgctggcagcaggcggacggagcgcgtacgtttgtggatgccttgtctggagagacggcctcatcgtcggagtctttggacggcacggcatacgccgatatcaatcagcaattgctgaccatcaccgcagccgacaccgtgcggaaagccgaacagctgctcgccgatggcacagtccgcggctacctggctgctgacggcaacggacgtttggcgataaccatcagtcgggaaacggtgaccgcggccaatgacaccacaggaagcgtcggactggatatcagcctatcggcattgcgcagcgccatcgacctgtacaaccgcaccgacgccgtcacccgacaaaccatcgccgacaatccacaggctgcgctcagccgcaacttctggaatagcatcgggcaaagcgtcgatgtgactcacgaaacaacgctcacgcatttccagcccaatgccatcgccagatactattacgcgttgctggccatgtcctgcatgattgccatggggtactcaatcagcacggtctccacagcacaagccaacctgtccgcattgggcattcgccgcaccgtggcgccattgagccatgccagacagcttattgccggtttccttgcctgctggttgtgcgcatcggtcgcattgcttatcgcattggcctatattcgcttcatctgcgacatttcgtttggagggcgagaaccggtgacggtggtcgcggtaatcatcgccgcattcatgaccagttcagccggtactttgctcggcgcggtaccgaagctttcctacgacacgaaatacggtttgtcgagcggaatcgcctgcacattgtcgctgttcaccggactgtacggcggcttcgccatgcagatcagtgactggatagcacgcaacgcgcccatcctcggcaccatcaaccccgcgcaacaggtgacgaacctgttttacgacattttgtactacgacagctaccagccgttcatcaccacttgtgccattttgctggcgatgagcgcggtattcctcttggccggcatcgcaatgctgaggaggcaacgctatgaacacctgtaaagccacattgcgtgtactgttctcgcacagggcctacctgttgatttacctcgtgttcgtgggcatcatgatgctgtctatcagctggtcgatgctgtctggcacatccgattccgcagccgcggcattcgagccggccaaaatgcgtgtcgccgtcatcgatcgagactcggacaggggcggcatcgcgtcatcgatgcgcacatacctgtcggattccagcgaactggtgaacgttgacgatgctagtgaaactctgcaacaagccgtcgcctcgaactgggtggatctgatcgtcatcatccccgatggtttcgccgacgatttcattgatgccgcggcgacaggcgagaatccaccaagcgtggacacggtcaccagctatacgtccggcgcaggctcgatggcccggatgaacgtcatcgggttcctttcactcacgcgtacggcactgattggctcgcatacgacggtcgatagtgcggcgctcgcagctatggccggtatcgacattggagacactgcgggtgattcgtctgaagatggcatgggcgggtttggtgaattctcgaatcaggacatgcttgatatgctgccggccggtcagattgagaaacccagcgtcggcgatctgttcgaggcatcgaaagcggctgccgcatcggcgagtgacatggacgcgaaccataaggtcgctgtgatcgacacggcaagcgcggacgcggaaagtgcttcggacatggcggccagcagatttggcaacaccatgaaaaccgcgctgtatccgctgtttttggcgatgaccgtctgcgggtcaatgattctgggcatattcaccaccggggaagttcgccgtcgtctcaccgcatccccacaacgcatgtcgtcgatgggactccagcggttgctgacgctcagcggattcgcgctcgtcgtatgcgtcggttatctggtgctggcggtcggtctgatggtcgcggcaggacttgatccgttgacattgagcgccgaaggagtgctgatgacgttctgcgcaacctgcgtatatgcgctgatgaccgtcgcctgtggattcatgctcagcgaattcgggttttcggaggcggctgccaacggattcgccaatatcttcggcctgctcatcatgttcacgtcgggcgtcgcattgccggttgacatgatgcccggcgtgatggtgaccatagccaagttcctgcccggctggtggtattgcaccgcgatcgacaacgcgctcggcttcggcacggctgcggagagcggcgtgagcgtcgccggctgggccggctcgctgggattggtcgcactgttcggtgtgatgttcatctgcattggcctggccgccggccgcttccgccgatcccgtcccaccctggccgcgcccgccaccacgcagctggccgagtgagaaatcagcctttcaaccgataccgctgtaccgagtcgtcggcgaacttgactcgggcaacccgcccttccttcatcagctcgcgcatgccggacgtggcggccagcggagtcaactgcagttcgcgcatgatctccttgacgctcatcgccgaatgccgttccagtacggtcataatcgccttgaccacgtcacccggtgaactgttcgccatcgtgcgctgcttggtgatggtcatcgtgaacgtgttgatgtcgttgcgcgtggtcgccggctcgatgccggcctcgcgcaacgcggcggcgatgcgctggtagccgtcgccgccttctgggttcacaaacccgccgcccggatacggcgtggactccagcagcgtgaacaggaactggtttcgggtggagacgaacggcgcgcccgtcaccggatgcgggctcgccagcacatcatgtgtcaccatgccgtacaggccacccggattggtgatctcgatgcgatcggtgaacacgctgatatgcacctgcgtgccgcgcgcatcgggcgaataatcacggtgggtgagcgcgttcgcaatcgcctcgcgcaacacgagtggcggataatcgggcttcttcgcgccaatccaacgcatcaacgagtcgaccgcatcgtcgatcatcaccggaatcgaaccgaccaccgacttcgaggcgaccaatcgttcgtcgccccggaacacatcgtcccggctcgtccctggaaacacggctatcgaaatgccgagccgcggatagaacttctgcggatagcggcccaacgccagcagtccggccaaggtgggacgcagtattccgccgacctccgactcgtcggaatcatcatggcgcaacacctgcagatccagcagcacatcgatgccgtcccggtcggcgaacacgcgcggatgctgttcgcgcacgcgtgccaacaatccggcaacaagctgcgggtcgaggtcatcggtcgtggcgccgggcacgatatccagatcgtaggtgggctgcagatgctcctcgatgagccggtcgacctcataggaggtcatgcgccggtcgccgtcgccggtgcggatgaacgagccgccgtgcggtccgagcgcggtggtgaagcagggcttgtcgcgcggcagcatttcgtcgatgcgcgcgaacaccagattcgcgccttcgaacgggcaggtgacgatcacgggccgcaccaccggcgtcatcttctcgcacgcctggctcagcgcctcctgcatggcgcgcgcgtcgaatccctcgaccggcgtgaacccgttcttttcggacaggccaaggatgatccagccgccggagccgttggagaacgcggacagcgtatcggtgatggtcgaggagatcttgcgcttgcattccttgacctcgcactgctgcgtatcgttgccgatcatgcgcatcagctcgatcagctcggtcatcttcgcggtgtagtcgtcaaccatggcggtcctccttgacaccattgtcccgcggccggctgtctgccgaagcctcccgcgcccacgtcctccgtcaattcattgaaaattcacgcggttggggtgcgcataagactgttgttttcattggtgcagtacgaggtcccgttgtctatttgtaagtgcaacgccttcgtcagagttgtaagtctggcagctcgtcggcaaacgcctcggcgggtgtgcggtggccgagcgctcgcatgggccggttgtcggtctcgtcgacgatctcctggagctccctcgccatgcccggttcgatgatcgtgcgtttgggcaggtaacggcggatcatgccgttgcggttctcgttgccgccccgctgccagctggaataggggtcggcgaagcacgtggccatgcccggctcgtcgcgcagccgcgcgtggcgggcgaacccggtgccgttgtcgtgcgtgacgctgagcctggcggccgccggcagcggggcgaacatcgccagccgcgccccgacgctccgctcggcggtcttgtcggggataacacgggccatgaggaagcgggtcctcctttcggcctcggtgtgcaggtcgcatcccatgccgatgacgctgtcggcctcccaatggccgaacccgctgcgagcgtccgcctccggcggacgctcggcgatggagacccttccggggatagggaacctcgacacccgacggcccgcatgcttgcgccgccgccggtggccgcgcggcaggcatcgggcccggcgttcgcggcgcggcttgctggaatggatccatcggtagacggtctccgggcacacgcgcatggcatcgtcgccggggaacaggacgcgcagcctgccgctgacgggcggcggcgaccagccgcagcccagtctctccgccacccacgcccacagccggtcaggcgacaggcgatgcggcttgcgcgctttggcgcgcctccgggcggccttgcgctgggccggcccggcgatgtaatagcggctcgtccaaggcccggtcttgagccgcctgggccgatagggacggtaggattcgctctcgttggacgggaaccacgtgttgcgtttgatctcacggctgacggtggacgggctgcgcccgatcatcgcgccgatcgcccgtatgccggtcccgttgccgatctcgatctggatgacctggcgttcctcttccgacaggtgcgaatacacttcccccataggtgcaacatcccttccggactggttttctagacaatctccaatctaacggggtgttgcactttcaattagacaacggggcgtttgtcaagcaaccggtaggggagatacaattatcttgtagcgttgatcgattccaaggagggaattatgagctatatgaaaaagattgcttcaacgctcgcggcggcagtcgcgtccgttgcttttgcccttgttcccagcgttgcactggccaacggcaccgatagcgttccctatgaggcgaacgccaccgttgtcgttgcccccaacgctcctgaagggtcagagttgatctttgaccttgagacgaagacgttcactgacattgttctcccgaacggacgcacgcttaagccaagccgtggttgcaccaacaatacttccgcttgctgggcaggcggcggagcgctcggcgacatggagtttacgggtactggcgcggttaatggcaattggcccagccggagcagcttctactccaataacaagtcagcggacatcggtttcacctggaaaggagaacgggtgtacgtaagccagattgctgcaaaccgcaaattcacgccaaacggttctgtcgacggcttctacgtcacccgttactaaaacctatgggagagcacatcctttccctacaacacctttagacggagggccggtgtcttcgggcaccggccctccgcgttcctagcggctgtgccggtgatgtggctgcggaatcggttcgtgtgttgtctttgctttttcgatgttctcagccagtctttgtttgattcgttcgttgaagcggctgcggttgagtctgcgcacgcgatcctcgtagggtttacgcatgtggtcgagcgtggccttggatgcgttggtgcggaaggcgttggcctcggcgtaggtagccgggatggtcgtgttctcaagccacggcgccgtttgcttcagaagctgggattgctcggcggcggtcctctcggccgcgtgtcggagccatccgcgcgtgaacgggttcgcgtgctcggccttttcgctggcctcgcgcgccacgtcgatgatccgttgcacgtccctgacttcccgtggaggctcggtcttccaccattcggtgaggtcggcgagctcacgcctggcctcgtccagttcgtccaccggttccggctcgggacgccgcggttcgcgtccgatctcccgcggcacgggatcaggcttggattccaagctcctgccggacgtgctcctggggggggcgtgggcgcttcgaccagttgccggccacgcgacgctatgggctggcgatcgaacacagtgattcccggaaccggctcatcgccgtgtcgagttccttcctggcctgctccttgaattgtccgagcaggccggtcgggtcgcccatctgtttgcggatggccgtcaggtaccggttggccgtggcgatgcgccggttgatcgcattgaggatgctgtgcccacctcgtttggtgatctcgcggctggcgtggccctcgtggatggtggggatacgttcgatgccctgcgcctcaaggctgcggtggtcgatgcgcacgccctcgggcagcatgaggttgcactgtttggcccagtcggcgcgcagccgttcgaggaattccgtggagtccaaggggttgttcgacacgtccacgcgcttccagaccttacggttcttggccccggtcttctgctcgccggtggcggggtctatgaccggtatccgctcgccgttctggtgatatgaactgatttttgttccgcatttcctctaactcgatgggggatgatggaaccatggcaaagggcactcgatatacgccggagttcaaggcgaaggcggtcaggctgctggcggaatcgcgttcctcgtattcgtcggagacgaacgcgatctccgcggtggcgaaggatctggggatagcgccggaatcactgcggcgttggcgcaaccagtcggacgcgacggtcgcggaggagacgaggcagtcggccgaggacgcgatggcggagctgaagaagctgcgggccgagaacgcgcaattgcgtcgggcgaacgagatcttgacgacggcgtcggcttttttcgcggccaggctcgacccgacacggcgttgatggccgcgtacatcgacgagcacagaagccgtttcagggtcgggccgatctgcagggtcctttccgaatcgttggactgcgggtttctcacgccgcgcggctgccgcatgttcagaacacgtcccgtcagccgcatgcgggcggggcgtgaggcgctggcccgcgccgtcctccagatccgctcggatttcttcatggccgtgtacggctgcgggaagatgcacgcgcagctggtcgcccagggctgggatccggccggggtcggccgcgaccgggtgatgaacatcatgcgcgggcttggcatccggggcgtgcgccgcggcagaaccccggtgacgacgaaacccgccaagggcacgggcggcaggccggatctggtggacgggaggttcgaggcttgtgcgccgaaccgcctgcacgtggccggcatcacctacgtgcgcatggccaacggctcgttcggctgcacggcgttcgccgacggcgtgtacgcccgtcggatcgtgggatgggcgtgcgccatgaccatgaacacgcaggagctgccgttgcaggcgttggggcaggcgatctcatgggccgcgtcccgcggcggcgcggatggtcttatccgccacggcgaccatggcacgcagtgcaccggcacggtgtacgccaccggggttatggaatatggggtgctgccgtcgaccggcaccgtcggcgactcgtgtgacaacgccatggccgaaagcgccgacggcgcgtacaggaccgagctggtatggcggcgcagacccttcgcggatctgaaggacctggaattggcgacgttccggtgggtctcgtggtggaactcgaagcgcctgcaccagtccctgggctacaggacacccgaagcggtggaaaccgagtatcatcaacatcaagcggcacaagccgccccactataaggacggaacaaaaatcaggccacttcacattgcatgccttgagggtaatggggacttccgctcacccgagtgcgtggagttgctggacgaagcggacatcgtggtcactaacccaccgtttagcctcttccgtgagtacattgctcaactcatggagcatgataagaagttcgtcgtcatcggcaatcagaacgctgttacctataaggaagtgttcccactcatcaaagagaaccgaatctggcttggctgctactcggggaacatggagtttcgggtgccgggcgattatgaggctcacagcgagaatgacaagtgattctggacggacgaatcggggcagaactggcgaagtatcggcgctgcctcgtggttcacgaatctggacatcagaaaacgtcacgacgaacttatcctcgtgaaacgctataagcccgaggattaccccaagtacgacaattacgacgcaatcaacgtgatttgcctgatggaggaatcacggcggctgcgggaagcccgttcgtattccagcaagtctgtcaggcggattctgcgatgacgtgatgggcgggaaaaaggaatgagtcctttatctaacattctgaccagcgtctgtcgcgatactcccagtgtgcgcggcttgttccgtcgtgagttcctgttccgtggcgctgatcgtcacgctcttcccctcggagagcatatggccgtctgttgaaccgcatcgcgaagttgcttcggcagcgccaatgagtagcgttcttccagcttggcttgatacattgcgtacgtgaccataaggccacaacggccaaatgaatcgggaacatcatgagtgattacaacgaacacataccggacggcgccggcgacaacggcgacgccgacgagctggtgtaccaatccgagggctgcggcaaggccgcgcattgcccactgaaacgactcggcaagggcgacaccgcggtcaacatcatcggtgtggccgtctcggccgtcatcgtcgcggcgagcatctacgcgcaatacgcgctgaccaaatgggccgtcaaatccgcgctcaaggaaacacgaccgcacgattgatccggtgataccactacaccgacttgccgttgacatgcgccccgtcgtgtggcctccctttcataccgggaggccacacgacgaaagctcagcgagcctccgccaatatgatgccggcatcggccatctgtttgcgggccgcgacacccaactcctcgctgaccggaacggtcagatcctcgaacacggtgacatcaaagccgagacgtttcgcgtcaagcgcggtgtccttgacgcaatgcgattcggcgatgcccaccacatccacctgcgtgacgcctgcggccttcagcgcattggccagcgtcttgccggcggactgttcggccgtgacctcctcgcgcgtctggatacggtcggtattgtcttcgatgccttcaaaaccggagtatgccgccgaatactggcccttcttgaaatgatgggcgatgcccagaaccgcgatggccggatgaagctcggcgttcggcgtgcccgccgcgccatgcttgggccacgtatccacgaaatccggattgcccgaccagtgtgcgcccggctcgatatgccaatcctgcgtggtggcggtatacgcatactcgccgcgatgcgcgttcacatagtcggcgatcctcccggcgaccgcgttgccgccttcgacccccagctcgccgccttcgcagaatgtcggctgcacatccaccacaatcagcgccttggccatgtcatgctcccatcatcgttcgattcgactgacgtttcccatcataagcgaccgatgccaaccgcataagcccctataaacggcgcgcctgacagccggatcgggactcaccggggcagctcattgtcatcgtatcggggcacggcggttctggtttccgcctccgccttcgccttgctcttggcgtacatcagctgacatgcccagacgatggcgagcacaacggaaaatgcgagtcccgataccacgtcaccgtatttgacagcggtgaatatcggcatggcgacggccgcgacgatgcagaagggcaacgcgatccatgtcctgcgcagtttggcccggtaactcgaatcccaatagccgaacggacggctgcccctgttttccataagcgttcctccggtcatcacgaatctgcgattgcgtcgatgcctacgatgatacggcacccggcgaatcgttatctttctaccgccgctgccgaagtcggctgatcattccatcgctaagctgtaatgatgggattcaatcggtaatagaccgatatggaatctttgctgatgattgcattgcacggggcagtattgggcataccatttcgagcgttgagccacggtgattcactgtgggtacgcgcactaagctggttcccggtttgccctcccagagccgtacatacatcattgatgatgctccgctctgcgtcatccaacgcgatatattgattcttctcctgtagaacgattgaatgatgcgcttcgccgatatgacgatgtggaacggcgcatcgaggatatttcagcaaagtcgggttatggaagcgatctcatatatgacaatgccgtgccggtgtatgcccggaatgctgaacagcttgagatgacttattattcgtacttgtcctacatggcggattgcgatgttggcggcttggtggcgtctgggctaagctgtgagaccatgtgcggaatcgtcggatatgcaggtaatgtttcggccacgtgcggcaagccccctcaggtgtgtcttcagggattgcaacgcctggaataccgcgggtacgactctgcgggagtggcgctcgtcgcttcgggcatggggcatgcagtggtgcacaagaaggccggaaggctcgccaatctcgtcgaaagcgtggaacgtaacccgatgccgcccgcgacggccgccatcggacacacccgctgggccacgaacggggcgccctccgacatgaacgcccatccccaccccctgcgtacgctggtcgtggcgatatcgcagtccgaagagactatggacacgctgatggccctgcgccacgtgcgcgagcagggatccatggtgctgtcgatctgcaacacgcaggtggcgtcgataccgcgcgaatccgatgccgtcagatcatcgactcgctcaatggcatgccggccaagatccaatgggtgctcgacacgcaggcaggcacggcccgatagcgctggtcgatgagggagagctggtggtgttcatcatgccgcccgagcgcggccgtgacgtgctgcacgccaaggtgcggttcggcatcgaggaggtcaagagcagaggcgcgttcatcatcgccgtcgccgaacagggcgaccgggatgatgaacgttatgcggatgtcgtgttccggcgtcccgaatgcccgacgttgatgagcccgctcgtcgacgtggtcccattgcagctgttcgccatggatatggccgagatcaaggggtatgacgtggacaagccgcgcaatctcgccagatccgtcacgattgagtgacgcgatggcgaaggacgagagatgacgaagaacgagagatgacgaacaacaaagacaagtggctgcgcgcattgcaggccaaagggatccgcacgccgcagaatgaggtcgggcgggccggcaggcaccgtcatgacgccccggaggcaaacccgccgaaagatcgggccggttttcgcccagtgaggggaagctccgccaaacctttcaaggcgaccggtcacaagggcggaatcagccggcagggtgcatgacgcggaatgtttcggcgaggtcgtgatttgatcgccaatgaccacctccagtcgcttcgcgactggaggtggcagatgctctgcagcttagatttttagtcctcgttcttggcgggggcggagaggaatcgttcttcgccgggcagcacggcgttgaggatcacggccaccacgaaagccacggcgatgcagttcgaggcaaagatctggcggaacagggccgggaactgcgcgaagatgtcgctcacctgcgtgaagccgatgccgatggtcaggctcaacgcggcgatggtgatgttgcgctgggtgaagccggcttcggcgatcatctggaatccggaaagaatgatgttgccgaacatcatgatcgtgcagccgccgagcaccgcttgcggcagcgagttgaacgcctccgccacggcaggcacgaagctcgccagaatcaggatcagtccgccggacaggatcaccttgcggttgacgaccttcgtcatcgccaccagtccgatgttctgggcgaaactggtcagcggcaggcatccgaacagtccggagaccgaggagatcaggccgtcgccggcgatcgctccggccgtctcacgctcggtcggcgtacggttcagacccaccttggtcagtgcggcggtgtctcccagaacctcgacggacgagaccacgtacagcagtccgatggagatgatcgcgccccaatcgaactcgggcttgaacggcatgaactgcggcagcgaaacgacggaaagctcctggaacccggaaaaatcgaccttgcccatgcaaatcgccaccgcatagccgaccaccaggccgaacagcacggacagctgtttggcggtgcccttcatcagcaattggaacgccagacaggcgaccagcgaaatgagacccagcgtcaggttctgccaggctccgaagtccgcggcggacgcgtcaccgccgccgaaactcgtggcgcccacggtcagcagcgagaagccgatggacgtcaccacgatggcggagacgatcggaggcacgaaacggcgccagtaccgggcggtcaggcccagcaccagctcaagcagaccaccgacgatcaccgcgccgaccacggctccgtaacccttgtcggcgcagatcgcggccgcggcggccacataggtgaacgagatgcccgtcaccatcggcagccgcgagccgatcagccacgcgccatacaactgcaggcaggtgccgagacccgccaccagcagacccgactgaatcacggccgccgattgcgcggacgtcatcttcgccgcgttggcgacgatgaatatcggggctagattggcgacgaacatcgccatcacatgctgcaggccgaacggaatgcccttccagaacgacacgggcgcgtccagcgaggacagcgcctcgaacgatacggaattcttcgttttcttctgcgacatggtttccttttctctcctctgctctaccgttgctctctgctgttccggactcagtccctgaacgtgatctcgccggtctcgggattcatggactcgacgatggccagcgaatccacgtcatagccctgcgcgcgcagttcgtcaccgccgccctggaaccccttctcgaccgcgatgccgattccctcgacactcgcccccgccgcatggcacagctcgatgagcccatgcaacgccttgccgttcgccaggaaatcatcgatgagcagcacgtggtcgtcggcgtccaaatatttcttggacacgatgacgggaaactccttgcgcttggtgaacgagtacaccgtggtgatgtactggtcgccgtcgaggttgatggactgggccttcttggcgaacaccaccggaacatcgccgaagtggcgcgcggcgcaacaggcgatgccaatgcccgacgcctcgatggtcaggatcttggtgatggtcttgccggcgaaatgccgggcccactcctgccccatatggtcgaacagacgcacgtcgcactgatggttcaagaacgcgtccaccttgagcacgtcaccggtcttgaccgttccatcacgccgaatgcgctcttccagctccttcataagtcccctttgcctgtaccgtcaatgaataggacagagggacagcatacgccatgcagatgaccgcggcgacctgtatgaatccgccacgagtccttgacgaacactttgtgattccaaaatgtttttttgggagggggatgctctagcataacctcgacggaacgggaagtcgtgtaaggagtatcagcatgcgcaatgaccgctatgagagcctggacggcatcaagggattcgccctgatcggcatcatctggtatcacctgtcgcaacgctcgctgcccggcggtttcattggcgtggacgtgttcttcaccgtatccggcttcctgctcgccctgagcgtccttcgtgagatcgaccgtaccggcagactgcgtcttggcaatttctatctgcgcaggttgtctcgactgtggccggcgatggcgttcatgatcgccggctcggtgtcgctcggcctgttcgtcaaccatgacattctggtgggtgtgccgggcaaaagcgtctccgcgctgacattcacgtcgaattggggggagatcttctccggagacagctatttcgcggcgacgtcgccgcaattgctgcggcacttatggttcgtggcgctgctggcccaagcgacgctggtgctgccgcttttgacggccatgctgcacagaatcggctccacgttcgtgcagtcgttggtgccggtgctgctcgccgcgctgtccgcgtgtggcatgtgggtgctgtacaacccgtccgccgaccccacacgcgtgtatttcggcacggacacgcactgttttggcatgctgttgggtgtcgcgctggcgttcgtcgtgcggcacagcgaggagtctgacgccgagccgcgccgcctgttcaccatggttatgccctggctggccactggcgcactggtcgtgttgatcatgatgatgccgcgcgtcgggcaggatgcgtcagcgttccgcggcggtctgattctggcctctgtgctcaccgtagtgctgatcggcggcagcatttccaaggattcatggatgatcggcctgttcggctggcgtccgctcgcgctgctgggcaaatactcgtatggcatgtacctgtggcattggccgttgtacctgctgctgcagcttatgcttcccggttatcgtggcagcggattgtgggtggtccagacgctcacgttgctgctgagcctcgtgatgaccgcggtgtcatggtggatggtggagaatccggtcgcggaatggatcaagtccaagcgcgacaagtcggctccccgccgcacggtggcgcaacgttcggctccgcgacgggtcggcagcgcgcgggcacgtggcgtgtatgggacgcacctcaacaacgtcgagttcactcagccgtactctcaggctgcgcccctgccctcgccgcaagacgcgccggtcgtcgcatcccgcagctcccgtaccgcggaggcgatgcgcatggtcgtcaccgtgtcggttgtggtactgatcgtcatcgggttcttcatgggtgtggcccaggccccggcgaagacgcagacacagatcatgctggagaagaaccagagcgcgctcgccaagaaggaacgtcagcgcaagatggacgccaaggccgcggccgaggcgaagaaacgcgccgaggaggagcgcaagcgccgcgaggaggccaaggcagccatcgagaagaccctgaacggcgaggacgtctccgtgatcggcgactccgtcaccgtgggcgcgtcggcggcattgcagaagtcactgcccggcatcgccgtggacgcccaggtgtcgcggtccatcctgaccgcgcccggtatcgtcgcgcagatgaaggcggaaggccgtctgcgcaagtacgtggtgatctcgctgaacacgaacagcgcgaccacggtcggcgaatacgagcggattgcggccgcggcgggtgatgggcatgtgctggtcatcatcaatgcgtatggcgaccgcgagtggattcccgtggccaatcaggcggcctccgactacgtgcgcaagcatcccaccgattcgattctggtcgactggaacagtgctatcgcggcacacaccgattggctcggaccggacggcatccacccgcaggccggacaaggcgaagacctgtatgcctccggtctgaggaacgcgttggcggaatgggaggtcgcccatatcgagtgacactgaccgaaccatgtggtaaacaggaaagccgaatcatcgtcaaccgtcagggggagcagcgtgcagcaggatccggatctcatcgcaagaagcgccgaggaactcgtcggcgacctcaacccgcagcaagccgaggcggtgcagtaccgggggcccgcactgctgatcggcgccggcgcaggatccggcaagacacgcgtgctcacccggcgcatcgcgtggatcctcacgcaattcggagcatggccgagccagatcctcgccatcaccttcaccaacaaggcggccgctgaaatgcgcgaacgcctcgaaggtctgatcggaccggtcgcccagcgcatgtgggtgtcgacgttccattccgcatgcgtgcgcatcctcaggcgtgacggccagtcgatagggctggcgtcgggcttctccatctatgacaccgccgactgcgagcgcctcgtcaagctggtcggcgccgatctcaacatcgacctcaagcgctacacgccgcgcgcgatcctctcgcgcatctccgactacaagaactcactgatcggctggcaggagcagctcaagcgctacgcgcccgactaccggcccggccagcgcggttatcagatcggcaatttcggcgacatcgaggtgctgtattccgtcatctacgccgaataccagcatcgtctggccatggcgaacgccgtcgacttcgacgatctgatcggccggacggtcgaactgctgcgcacccaaccacaggtggccgactattaccgtcataagttccgttatatcctcgtcgacgaataccaggacacgaaccatgcccaatacgagctgatccgcgagctggcgggcgtggacgcggccgggcaggtcgtgccggacgccccctcggcggggcgggccggcccggcatggatcaccgtcgtcggcgactccgaccagtcgatctatgcgttccgcggcgcggacatccgcaacatccaggatttcgagcaggatttccccaacgcgaagaccatcatgctcgaacagaactaccgttccacgcagaccatcctcgacgcggccaacgcggtcatcgccaacaaccagggtcgcaagcccaagaagctgtggaccgcattgggcagcggggacccgatcgtcggctatgccgcggacaacgccgagcaggaggccgcgtggatagcgggggagatcgctcgcgtccgcgccgaggagggcacgccgtattcggacatggccatcatgtaccgtgccaacgcgcagtcgcgtgcgcttgaaggcgcgctcgtgcatgccggactgccgtatcagctggtcggcggcacgcggttctacgagcggcgggaggtcaaggacgccatcgcgtatctgcaggccatcgtcaatccggccgacaacgtcaacatgcggcgcatcctcaacgtgcccaagcgcggtctcggacctcgtgccgaatcgatcatcgtctcatatgccgatgctcatgcgaccacgttctgggacggcatcgaacatcttgaccagatcgacggcgtgcccacccgcaccggcaagcagctcgccgcattcagggacctgatgcgctccctgagcgcgttcgcggccgagcatgacggcaagccgtccgaagtggtgggggaggtgctctcgcagtccggtctgctcgaagaactgcagcggtccgaggatccacaggatgcctcccgcgtggagaacctgtcccagttgcagtccgtcgccgccgaattcgagcagaacacgccggacgccacactcgcgggattcctggagaccacggcgctggtggcggactccgaccagctgccctccgagggcgaggactccggcaaggtcacgctgatgactctgcacaccgccaagggcctggaataccccgtcgtgttcctcaccggcatggagcagggcacgttcccgcactcgcgggcgatggaggacgccgacgagctttccgaggagcgtcgtctggcatatgtcggcatcacgcgtgccaagcgtcgtttgtacgtcacccgtgccgccgtgcgcgcgcagtgggggcaggccaacgagatgatgcccagccagttcctcgatgagatccccgaccggctcatcgactggaaacggcgcgaaaccggcatggagggcatgcgctccggctggtcacgccgcggcttcgacgacgagttcggcggatgggacgatgacgacttcggcggcaccacatacggcgggtcgtcctcgtacggtggttcctcgtcatacggctctcgtggacgttcctcgtacggtggttcctcgtcgttcggctccggttcgcgcggcggatcgggctcgtcatatggcggggccaggggattcggctcatcttcgcgccacggcggctccggccgtcagggctccggacagcagtacgggtcgggcagccggttcggctcatccacgggattgtcgcgtggcggcaaggtcacgacgcgccgcaccgctcccaagtcatctctctcgtcggccaaaccggcctcgtcgctcagcaaggacaataacctcaacatcgccgacttccatgccggtgacaaggtcacgcatgaccagtacgggctgggcaccgtcgtcgacacgcaggacaagggccgcaactccgtaatcacggtcgatttcggctcgtcgggcgtcaagcggctgatgctgcgcgtggcgccgttggagaagctctgaggtaaccacccaccggcggcttcgcgccacctcccgccagcgggaggatggtggtgggaccttaccggcggatgaccggcgcatatatgaaaagcgttgaaaagtcaaggcttgtgtttcccggaaacggttgacataatcgtcgatgtccatcttcaaccgagaggagacaacaatgttccgtagactattcgcatcgctgccggccatcgtgttcggcgtgcttatcgccgtcgccccgcaggcattcgcccatgtgtgcgaggtcaaggataatatgcccatggcgtgccattacaccgcgcaagcggagcttggcatcggcgtggtcatcgccctgctgggtatcatcgctttgttctgcagcccgaagatacgtacaggtctcaatatcgccgtcgctttgaacgcactgctgtcgctggccgtgccgacggtgctgatcggcgtgtgcaagggcgccatgatgcattgccatatggtcaccaggccgacgctcatcgtgatcggcattctggcactgctgttcgccgtcgtcgccatctaccttgactccaagcccgtcaagcgatgatcacacgaatcactctcaaacgactgccactggagaacctgaagcgcaagccgtttcgcacggctgcgctcgtcatcgtcgtcatgatgctgacgctcgcgttcttcggcggctcgctgctgtccatgaacctgcgcaacggattgcgcagcatgcaggaacgcatgggagccgacctcatggtggtgccgcaggataccggcgccaaagccgaggccctgctcactaacggcggatccaacacgttctatttcaccaacgacatcgagaacctggtctccaaggccgatggcatctcccaagtcacggcccagacgtacatatcatcgctcgcggccgcatgctgcgacgagaaggtgcagatcataggcttcaaccccgcgaccgacttcgtcatcaccccctggatcacatcgcagttcgacgggacgctgaaagacggagaagtcgtagccggctcgaacatcagcgtatccggcaacaacacgatcaagctgtacgggcatgagttcccggtcgccgcccagctcggctcgaccggcaccagcctggacaattcggtgttcgtcaatatgtccaccatcccctcgatcgtctcgtactcgtcgtcggtgggacacgcggccatccccgccgaatacgccgacaaggcggtctccgcgatcctcatcaaggtcaaggacgggtatgacgccaagcaggtctcgctcaacatcaccaaggaatccggtctcgaagggctcggattcgtgtatccgggcggcgtgacagccactaccaagaccaacctcgacgcgctggtcgggtacgtcacgctgttcgtcgcagtgttctggatcatgggcctcatcgtgctgctggcagtgttcgcatccgcgatgaacgagcggaagaaggaattcgcggcctaccgcatcatgggcgccacgcgcggcacactgattgcgctcatcgtcaaggaatcggcgctgatcggactggtcggtggcgtcatcggcatcgcgggcgcgtctctggcggtgttcccgttcaacacgctgatcagcaggcagctgcagctgccatacctgcagaccgacgcgctcaaggtcgtcgcgctcgtcgccataagcctcgtgttcgccgtcgcgaccggactgctggcgtcaatcgtcaccgcggtcaagctgtccgcgcccgaaacctatctcacgttgcgcgagggggagtgattcatcatggcgatgcttgaaatcaatgatctgacccgtgaattcacccggcgcggcgcgcgtttcgccgccgtcgaccacgtgagcttctccatggaccagggcgaactggtcgccatcatcggacgttccggcaacggcaaaagcacgctgctcaatctgatcgctggcctgctcaagccgacgtccggcaccgtcgagatcgacggccgaaacgtctccaagctgtcggacaaggagctctcgcagctgcgcaacgcgacgctcgggttcgtcacgcagggacagacgctgctcggcaacctcaccgtgctcgacaacgtcattcttccggccgtgctgtttggcccggcgaagaaaacggtggtgccggatgatgttgcggcgcccggcgaagccgatgccgccggcgcggccgattccgcacgtgagcaggacgatgccgacatgcccgacgtcatcgacgatgatctcacggcggagcacgagcccgacgccctggagcgacgggcgacgatgctgctggatcgactcggcgtggctgacctgtccgacagctatcccaaggagctgtcgggtggcgagatgcgccgcgtctccatcgcccgggcgctcatgaacgggccgaagctgctgatcctcgacgagccgaccggcgatctcgacgcgacgagcaccacgatggtcatgcgtctgctgcgcaacgtcgccgatgagacggcggcggtgcttatcgtgacccatgacggcgacacgttgccatacgccgaccgcgtgtatgccatggacgcggggcggctcaccccggccggcggagcctgacacgcagggtcgtccatagggtatgcgattataaacgattgtgtctgccataaggcggatgctatctggagtcttagcccatcagtgggtcggcggcggttttccgccgttcgtgcacgtcacgacgaagcactggggaggccgactcagcgcggggacagcctcgcgttccgttcagataacgacagaataaaggaacaagaatgaccaacgttcagcgttctcgccgtcaggtgcgcctttcccgcgccctcggcatcgcactgacccccaaggctcagcgcatcttcgaaaagcgcccgtacgctcccggtgagcacggccgcacccgtcgtcgcaccgaatccgattacgcggttcgtctgcgcgagaagcagcgcctgcgcgcccagtacggcgtctccgagaagcagcttcgctccgcttacgagaaggcgacccgcaccgccggccagaccggtaacgcgatgctcaccgatctcgaagtccgtcttgacaacctcgtgctgcgtgccggcatcgcccgtaccaccgctcaggcccgtcagttcgtggtgcaccgtcacatcctcgtcgacggcaacatcgtggatcgtccgtcctaccgtgtcaagcccggccagaccattcaggtgagggccaagagccagaccatggttccgttccagatcgccgccgaaggcgtgcaccgcgatgtgctgccgcccgtccccggctacctcgacgtgaacctggcttccctgaaggccaccctgacccgcaagcctgaagtcgaggagatcccggttcaggtcaacatccagtacgtcgtcgagttctacgctcgctgatctggatccaccacctgtaatttacagcgtaaggacatacatacacacgaacgccccgtggcattgcgctcggggcgttcgtgtattccggtcctgttctcacgggttcggccggccatcggccgcgttcatcgtcactggccgcacaccgcctgccgcagcatcgtcgcatacgcataagcgccggtcatgttgggatggatgccgtcgtcgtacaggtattcgccgtggccctcgctgtacttgtaccagtcgatgatgcccacattgccgttgtggctggctgcggcacgcatcatcgagttgttgttcttctcctgattcggatagggcatacggatcgtcacgaaatacaccggcttgccgcccgcaaggtcgatcagctgctggaccacctgttcgttgcggatgatgccgttcgttccgagcccgtaaatgatgacgctgccgctgtgcccggcagtggtcgcctgctggaacacgctgacggcctgaggcatctgacggttcggcttgccattgatgtatccgttcgggaacgccgcctggatcgcatccttcgtgccggaggtgacggaatcgccgatcatcatgatgtcggcgttgcagcttcctgtattggggtcatagtggtatttcgaagcatccaggttgtcgggcaccttctccgcaatgggcgcgacagatggagacgtcggctttgcgctgtctccgttccgctcggagccgtcgtcattcgtctgattcgccgtggcattgttgctcgccgtgccgtcgtccgagggcttttcgatgctcttcggcttgggtagggcgagaggcttcgccggctcggcgagttcgggccggagttggatcatgcggtcgtgggcgatctgctcccaattcaccggcgcccaggtgagcgcggccacggtgacgatgccgagagccgccatcacccatgaccccggcctcagccgtccgctcggctccaccgatgcccttgcatgcctgctgcgcggcgtcggctcgtacatgcgagtggcctcgaccagctggtagaacgcctccgtcgccgtccatatcacggccgcctcaatcagccatccccaccacggcagtgcttcggtgcgggtggcgggattcatgaactgcagcagcgggtaatgcatgagatacagcgaatacgagcgcgaccctaggtaacgcagcggagcgcagccgagcacacgcggcaggctcactcctctgatggcgccggcgagggccaaggcgcccaatatggcggcgacaaggtacccgccgtgatacatcgtgtcgtcatagccgttcatgaaccagaaaccggcgcatagggccagcaacgacagccatccgaacacgtccaggatgatagcggacgcgccgcgaccgtcgtctgtctgtttgcgatcgtcagcggtccggtcggcacgctgcatcagcatcgccagcatcgcccccatcgtcagctccgcgagcctcgtatccgtaccgtaatacacgcgcgacgtgtcgtcgggatcgaacagcagccacatcgccgcgctcgacgcaagcacgattatcaccatcacgacggtccgagcccatttggcgcgaacgagacggccgatcgccatgatcagcagcggccatacgagatagaactgcatgaccagcgcaaggaaccacaggtgcgtcagaggggaggggagtccggccgccgcgaaatagggaagtttgcggaagatgttcacccagttgctggcgaacagcgcgcctggaagcgcgtcggtgcgcaccttgtcgagaaggctcggggcgaacagccatgcgaacggagcggtcagggcgattgtggccagtgttgccggccacagcctcttgatccggcgccccagataccttccatactggaacgtgacatggctgtccactgcgcgaatcaccgaacgagtcgctaggaagccggtgatcacgaagaacatggtgacaccgatgaaaccaccctcaagcagcgatgggcgtgtgtggaatgcgaccacgccgagtattgccacggcacgcaggccgtcgatgccgtcgaaacggatttgccgctggctgtcaggcagccccttctgttcttgctctctcatgtggcctagtctacttcaccgcgggtttcatggctatagttgtgacctgaacccgcgttcgcgtttattggtgttcttgcgcttgtgtttacctgtgttcatatgtgttcatccggcgaaagtcccatttattcgtcgccggatgggactttcgcgggaaaggcgtggggatgattccccgccgaccgtcatccggctatcgcctgtaccacaccatgcgatttttgacggttttggggctggtgtggccaagggcgattccgggcccattcaccggcccttggaaaatggcggtttccgcgacccgtgctttgccacaccacatgatgtgaaggctcacatcgcatggtgtggctctctgctgtgccacaccatgcgattttggggtgtttttcgcctagtgtggcacacgggctgggagcgaatcagccggacggatgggtagggactgagtgcgggctgttccattgagctgagaaccaccccccccagtcatgccgcgcatgccagccccccccgccagcgggggcgttagcagactggaggggtctgtggcgatgggcgcggcgggttttgtggcatgcgggaagcatggaataatcgtcggtatgattctccatctgcatcttgtccgccacggacagaccacgttcaacaggtacaaccgacttcagggatggtgcaatgcgccgctgaccgaagcggggttggcggacgccgacaaggcggcggaaaaactcaagtacgtgcggttcgctgccgcgtactgctccgatacgtcgcgtgcgcagatcaccgcgaagcgcatcctcgacgtgaacgaggaggtcggcaacgcccggccggtgctcgtgtcggacatgcatttccgcgagcagtgctacggctatttcgaaggtcaggacatgtcgctcgcctggacggccgcgggagggccccacggcgcgaaggactacaacgacatcgtcgccaagtacggcctcgccgcgacccgcgacttcctcaaggaggccgacccgttccacgacgcggaatccgacgccgaatactgggcccgcgtgcacggggcgttttccctgatcgcgtccaacccggatctcaaggacggcgacgacgtgctgcagatatcccatggcaatacgctgctcagcctcatgcaccgcttcgcgccggaagggtatgacctgagcgagaggccggccaacgggtcggttacgtgccttgatttcgatacgaccaagccgttcgaagtggctctcaccgtcgtgtcatacaatcagtgagacgcgcgaccgggccggccgacccgcatgccgccggcagcgtcggtctcgggtgacggctagtgtgttgcgggtattgtgtgcacgggcgtatgcctgtgggacggaaaagaggtacacatgggtgttggccagatcgccggccttatcgcggcaatagcattcgccgtgcttgcaggcttcatgatctatccgttgattcgcctcggcaagctgttcgaccagatcgcggacaccgtgcgcgagtcgggggagcacgccatcccggccctcgatgagggcgtcaccaccgtcaagcaggtcaacaaatcgcttgaggatgtcaacaggatctccgcggccgcgtcgtccactgccaacaacgtaggcgccctgaccgatctttacggttcgttcctcggcaagcccgtcatcaagatcgcgtcgttcttctatgcgctgaaatccaccgcgcagtcgttcgtcgccaagaagagcaccggccgtgactccgtcgaaggctccggacagcaggaaagcaaggctcagtgatgttcaaacgattgttctggatcggtgtcggcgtgaccgtcggcgccctagccgtcatcaaagcccaggcctacgtcaaggccaacacccctgacgccgcacgagcgttcgtgttcggcccggatcaggaccatgtgggcatgaggacactggaaggcctggtcaacgagttcaatgccacccgccgagcccgcgaggctgagctcaaccaacattacatcgaccgcgccgcgcggtagcgaatccggggcatgccccccactttcacacgcataacagctgttcaaatttttatctatcattttgcatgcgggccagcacggccccaacccacaagggagctcaccaactcatgcgcacttcagaaatcgcgaagcgctatctggattacttctccaagcacgaccatctggtcatgccttcggcgtcactgatctcgccgaacccgaccacgctgttcaccatcgccggcatggtgccgttcatcccgtacctgctcggcgagcagacccctccccacaagcgcatggcctccaaccagaagtgcgtgcgcacgctcgacatcgacgaggtcggcaagaccacccgtcacggcaccttcttccagatgctcggcaacttctccttcggcgactacttcaaggaggaggcgatccactacgcctgggagctgctgaccacgccgcagcccgaaggtggttacggcttcgatcccgagaagctgtgggtcaccacgtacaccgatgatgaggaagcccgctcgatctggaagaacgagggcttcgaccccgagcacatgcagatcttcggcatggaagacaacttctggaccaccggcggccccggccccggcggcccctgctccgagatctacgtggaccgcggacccgaatacggcaaggacggcggccccgcggccgacgagacccgtttcatcgagatctgggatctcgtgttcgagaactacgaggtcgacaacgtcaagtccaagaccgacctgcacatcgtcggcgagctcaaccagaagaacatcgataccggtgccggtctggagcgtctggcctacctgatgcagggcaagcagaacatctacgagaccgacgaggtctacccggtcatcgaggcggctgagcagctttccggccgcaagtacggcgaggacgcggccgcggacgtcaagttccgcgtcgtggccgaccacgtgcgttccgcgctgatgatcatgtccgacggcgtgcgcccgtccaacgtcggccgcggctacgtgctgcgccgactgctgcgccgcaccatccaggccatgcgcgtgctgggcgtcaccgagccggtgatcccgcacctgcttcccgtctccaaggacgcgatggtcgccagctacccggagctcgaaaagacgttccatgacgtctccgaatccgcctacggcgaggaggacgcgttccgccgcacgctcgacaacggcatcgaaatcctcgacgtcgccgtcaacaaggcgaagaagacctccgacccggtcgtctccggcgacgatgcgttcacgctgcacgacacctacggcttcccgatcgagctgacgctggagatggcggccgaccagggcgtcaaggtcgacgaggccaagttccgcgagctgatgagcgagcagaagtcccgcgcccgtgccgatgcgctgaagaagcgccacaacgttgacctgagcgtgtacgacgacttcaagaagacgctcgtgcagcccatcgacttcctcggctacaccgacatgtccgctcgcggccgcgtcctcggcatcatgcaggagggcaaggggtcggttccggccgtcagcgcccccgcgaacgtcgaggtcatcctcgaccgtacgccgttctacgccgaggccggcggccagctcgccgatcagggcgagatcctgtccgacgatggcgcggtgctcgaagtcgacgacgtgcagaagccgatcaaggatctcatcgtccaccagtgccgtctgaccgaaggcacgctggccgtcggcaccgaggtgagcgcgagcatcgatctcgcccgccgcggcgccatcgcccgctcgcacaccgccacgcacatggtccacaaggccctgcgcgaggagctcggcccccaggctacgcagcgtggatccgaggatgcgccgaaccgcctgcgcttcgacttccagtggtcgtcggcaccgagcaaggacgtgatgaacaccgtcgaggcgcgagtcaacgaccgtctgcgcgacaacctgatcgtcaccaccaccgaaatgaagttcgacgacgcgatcgcgctcggcgcgatgcacctgttcggtgagaagtacggcgacatcgtgcgcgtggtctccatcggcgaggacggctggagccgcgagctgtgcggcggcacccacgtcgaccacgtcggcaagatcggctcgatcaacatcatgtccgaagcctcgatcggctccggcgtgcgccgtgtggatgccgtcgtcggccagggcgcctacgagttcaacgcccgcgagcacgccctggtctcccagctgtccgacaagctcaacgcacgcccggacgagctggcggagcgcgtcaacacgctgctggccaagctcaaggaatccgaccgccgtctggccgccatgtacgaaggccagctggccgcgtccgtgccccagctcgtcgcggccgcgaagacgtccgcggcgcgtgtcaaggtcgctgcgaagaacgtcggccacttcggctcgttcgacgcgctgcgcaagaccgtgatggacgtccgcgcccagctcggcgaggacgcgccggtcgtcgtcgcgcttgccggcgtctccgaggacgacaagccgatggtcgccgtggccacgaacgaggtcgcccgcaagaacggcatcaaggccggcgacctggttcgcggggcatccaagatgctcggcggcggtggcggcggcaagccggacttcgcccagggcggcggctccgacgcgagccgcatcgacgaggcgctgaaggcacttgaggccgaggcgctgaagggctgaaccatccggtggtatggctaggcgttgatttgggcgacgccagggtcgggctcgcattgtccgaccctgagctcacctttgcccatccctatggcaacatccaggcatacggcgattcgttccgtgcgctggatgacgtcattaccgtcatcgaggacgaagcggtggaccacattgtggtgggactgccgcttcaacttgacggcaccgaaggaaaaagcgcgaagaaggctcgccgttggagcgcgaacctggaaaagcgcatgcgcaacttgatggatgaacacgatttcgcgttgtaccacattcctcaggtaacattactggatgaacggctgaccacggtcagcgcgcatcggcaattgctggaagcacaactcgggtcccgccgtcatcgtccggtggtcgatcagcaatcagctgtcgtgatattgcagaccgcgctggacggcgccatgaaagtgtgaggagagagctagtgtcagatgacctcgccgattttttcgaggagaacacccattgggtcgactccaaaggcaacaccacgtcggtaaagccccccagaccgccgaaatcacggcgtgaaatgcgccgtcggcgcaatgtccgccgccgcaagaccatcatcgtgctgaccatggtcgtcgcggtgctcgtcgtggtcatagccggcgggttcttcggagtcagggcgttgcgcgccatcagggaccgcaacgacggtgacacctactccgtgcaggactacagcggtcagggatacgggtccgtggagttcaccgtctcgcagggcgagagcccgtccagcatcgccaagcgtctcgtcgaggccgaagtggtcaaatccgcggacgcgttcaccggtgtctcatcgggtatgacgctatacccgggcacttatcagctgcgcaagcacatgcccgcgtcgtccgtggcggcgatcctgtccgatcagagcaaggcggagggcttcctcgacgtcaacgcgggggagcgtgtgtccgacgtcatcaagaaggccgcggcgctcagcgagatcgacgaatccgaattccagaagatcatcgacgccaaaggcgagggaatactgcccgcggaagccggcggcaacttcgagggatggctggaacccggcaagtacgacgtcaagggactcggctccgcgcagaagatcctgaagaccatcgtcgacaagcgcgtctccaagctcaacgagatgcacgtgcccaccggcagcgagcggcagcggctgctgatcatcgcctccatcgcggaggccgaggtcaattcgtccgattactacggcaaggtgacccgcgtcatcctcaaccgtctcgaccgcgacatgacgctgggcatggattcgaccaccgcgtacggtctgggcatcaacggcacgcagctgaccaacgcgcagctcaacgactcgtcgaacaaatacaacacgcgcgtcaacaagggactcacccccacgcccatcagcaatccgggagacaacgccatccaggcggcgatgaacccggagcagggcgactggctgtatttcgtcaccgtgaacctgagtaccggcgagacgaaattcaccaccggctccgtcgaggagcagaacgcgcagttcgagcagtacgtcaaggaatacaaggacaacaacaagaacgcgaactaaagcagcgtcgtcgcgatgaccgcgaccaccgccgcgcagacgattgcgggtgcgaacgggaccttgcccgcatggtcggatcggcgctggggatcgaaccttagccacagcgccatccatgccaatcccagcagacccatggccagccaccagaccaccacggcggtcagcccggccatccccacggccaggcccatggccagcgtgcaggtcacgtcgccgaaccccatcgatccgggcttggccatcgccagcccggcctgcagcacggcactgagcgcggcgaatagaggggcctgtaccagcaggaacatcgtgttcgccatgacggcgacgatgatgaccgccaccagctgtgccaggcacccgatggcgatccacaggcgcggcacacgccggcgccgaatgtcctcgacactcacggcgataccacatatcaagctgggaaggtatgcaaggtaggtcatgacataagatatagcgaagttaccgattgaatcaaaggagcatggcatgttgcgctggcagacggcgggggaatcacacggcgaggcgctggtcgcgatgatcgaggggttgcctgcgggcgttcgggtcaccagcgatgacgtcgtcgatgcattggcgagacggcgcctgggatacgggcgcggcgcgcgcatgaagttcgagcaggataaggtgcgtctgctcaccggcgtgcgtttcggcgagaccctgggatcaccggtggccatcgagatcgcgaacaccgaatggccgaaatggaccgaggtgatgagcgcggatccactcgaccacgatctgccgcgtgaggggcgcaacgccccgctgagcaggccgcggccgggacacgccgacctcaccggcatgcgcaaatacgggttcgacgacgcgagacccgtgctggagcgctccagcgcgcgcgagaccgcgtcccgcgtggcgctgggcgcggtcgccgcgcggttccttgagcaggcgttcggcattcgcaccgtgtcgcatgtgatctccatcggaggggcgggcgtcgaggacgccgatgacgcagcgttgccgacccccgacgacgtcgaagcgctggacgcatccccggtgcgtacgctggacaaggcggccgaggagaggatgatcgcgcgcatcgacgagatcaagtccaccgccgataccgtcggcggcgtgatcgaagtgctcgcatacggcgtgcccgccggcatcggcacctacgtcgaatcggatcgccggctcgacgctgccttggcctcggcggtcatgggcatccaggccatcaagggcgtggagatcggcgacgggttcctggaggccgtgcgccccggatcgcaggcgcatgacgagatggtccccggcgcagatgggcgcatcacgcgactgaccaaccgtgcgggcggcatcgaaggcggcatgtcgaacggccagccgattcgcgtacgggccgcgatgaagccgatcccctcgattccgcgcgcccttcgcacggtcgacgtcaccgacggcgaggccgcatccgccatcaaccagcgttccgacaccacggccgtgcctgcggcctccgtcgtggccgaggccatggtccgactcaccttggcgcgatacgcccttgacaagttcggcggagacagcgtagcggagacgcgccgcaacttcgagcagtacgtcgcctcctggccggagcacatgcgctgacggcgcggtaacgtcatccgcaacgaaccgtacgtcctgaaccaagggagagaaaccatgcccactcgaccagtcgccgtcatcatcggtatgatgggcgccgggaagacccgtgtcggcaaggaggtcgcgcagctgatgtcgctgccgttcgcggatgccgacgtcgaaatcgagcacgaggtcggcatgcgcatccccgaatatttcgagcgtcacggcgaacccgcgttccgcgaggtcgaatccgaggtcatcgccgggatgctgcacgggttcggaggcgtcttcgccctgggcggcggcgctccgatgacgcccgcggtgcaggacgatctcaaggaatacatcgaggacggcggcaaggtcgtgtatctcatggccgacccgcgcgaggccatggaacgggcccatcgcggtggcggccggccgatgctgcagggggacgccgatgcccgctggaagaagctgtaccgccagcgcgacccggtgtactaccgggtggcgaacgtccatgtcgaaacatacgggcagacgccgctcgccgcggcgaggaagatgatggatatgattaccgaacgaacggttcatgtgaccggcgcgaccatcgaggattatgacgtgagcatcggggaaggggcgatgaaccacctctccgaggtgctggggccgaagccggtccggatagccctgatccacacgcagccggtgcagcgtcattccgaccgtgcccgcacgctgctgcgacaaggcggctaccaggtgtcggacatcgtgatccccgacgccgaagcgggcaagacgatcgaggtcgccaacggcatctggcagcggctcggcgacgagggcttcacacgctccgacgccgtggtgggcgtcggcggaggcgccgccacggatctggccggtttcgtggccgccacatggatgcgcggcgtgcggtacgtcaattgccccacgtcgctgctcgccatggtggacgcctccacgggcggcaagaccggcatcaacacgccgcagggcaagaacctcgtcgggtcgttctacacgcctgccggcgtgctcgccgacctcaagacactcgtctcgctgcccaacgacatcttcatcgaagggctgggcgaggtcgccaaatcgggattcatcaaggaccccgaaatcctgcacatccttgaagagcatgcggccgaacttcgcgcattcgacggggctacgttccttggcagcggtctggagaacgtggtcgccgagctgatcgagcgcacggtccgggtcaaggcgtaccacgtctccgcggacctcaaggaagcgggcctgcgtgaattcctcaactacggccatacactcgcccacgccatcgaaaaacttgagcatttccgctggcgccacggcaacgcggtcgcggtcggatgcgtgtatgcggcggaattgggtcatctgctgggctatatcgaccaggatctggtcgattatcaccgctctctgcttggctcgctcggtctgccgacctcatggaacggcggcacgttcgacgaagtgctggcgctgatgcaccgcgacaagaaggctcgtggcaacaagctgcggttcgtcgtgctcgattcgatcggccatccggtgcatctggacgatccgccggcggacgcggtcgaggaggcgttcagacgtatccaggcgtgacgacgccggaccggtctccacatgaccggtccgagtcgtgttttcgcccaccccagcaatatcaatcatcagccaaaggaaagtgcatcatgaccaaggtgatagtcgtcaacggaccgaatctgggccgcctcggagtgcgtcagccggacgtctacggcaggcaggatcttgagacgctgcgcacgcaatgctcccagtggggcgccgcgcttgggctgaaggtcgaggtgcgccagaccgacgacgaggccgagatggtgcgctggatgcatcaggccgtcgacgagcagaccccggtggtgatgaacccggccgcattcacgcattactcgtacgcgctggccgacgccgcgcacatggtgggcgatgccggactgccgctgatggaggtgcacatctccaatccctccgcccgtgacgagttccgcaagcgttcggtcatcagcccggtcgccaccggcaccatcacgggaatgggattctacggttacaagcttgcgctggacgccatcgctcatcttatcggctgatccgcagtcgcagaaccgtttcaacgggtggtcatcattgctggtgcgcttgcgcgtcgggcttgctgcgcctagtgtggtgtccatgaacgatgaagcgaatcaggggtacccgcaaggtccggccaatggcggttatccgaacggtgcatcgctttacggggttcagggcgatgcacacaacggcaacaacgattatccgcagtatggagctgcttcgcagcccggggagcatcagcccggttacgcgcagcccggttacccgcaacatgactcctggcagggtcagggcggctacgccggcggccagcgtccgccggcaggcgggcagcccgtctatcctccggtgggagcaggccaacggcagcagccatacgccggcggctatccgcagcagggtgcgtatcagcgtactccgtaccagccgtacggtcagcctccgaagaagaacaacacgggcaagatcatcgccatcgtcgtctccatcgtcgtcgcgttggccctgatcggcgtgctggtttgggcgttgacgtccaagggaggcgacggcaaggacggcaagggcaccgaaacgtcgcagacgacgaacggcggttcgaacaacaagaacaaagatggctacatcgaggttccgcgcggcgactcgaacggaaactccgacgacgactcctacgactccatcaacaaggactaccagcagaagaagcaggagctggacaaaaagaagcaggagctgcagcaggaactcgacaactacaagaagaagtacggcggctcaagctcgtatgacaaccagaattcgtacgattcgtatggcgactcctatgattcgtacggtgattcctacgattcgacgggctactgatccgcgtcgaacgaggtgtcggccggctcgacgcggctgaccgcgttcgaccggtagattgtgtgacgcgggcatcatccctgacggcgcatgccgtcttcggtatgatgcccggtccatttgagcaccgcctggacgcggttttcggcgttgagcttctgcatggatgactgcgcgtgcttgcgcacggtggccgctttaatgccgagtcgtttcgctatcgataggtcggtcagcccacgcgacataagatcgagcacctgcacttcgcggttggagaccaggtcagcccgtttcggcgtctcatgcgcgagctggtcgaatgaggcacgggcgtcaacgaacccgaaatcaccgtaaacgcctccgccaagtaccgtcgccaagccttcgagtatttcctgctcgtcgttcttgctgaccagtccttgggcgccggcctgcgccacgtcgaatccgaacgtctccttggcgaacgaggtcatggccagaagcttcaccatgctgtcgcgtcggcggatacgacggcataccatgacgcccgacatggattccatcgacaggtcgaccaggaccagatctggtctcgtccgggcgtccagcgtcaggctcacggcgcgcggcccgtcgatgaccgaccaggctatgcgcagtccaggtgtcatttcgagaacgagacgctccagcgaatccaatgaccgcctgtcatcatcaaccatgccgattgtcccagtcaggtcatcgaaaatccccatacaatcacatacctcatcatatgctttcaggtttccccccatagtaacccccttatatacccccgtcaaaatcaacgggtgttgcatccatgcccccatgtttgatgccaggatatgagggtgcattgttgctgtaagcctcatcctgccaaagtcccatttgatggtgtcgggatggggctttggcgggatgaggcagaggccgttgttcgtgtggcatggcgggatatgaggctattggtacgattccgtaacagcctttgaagttccgtgccgattgcgtgtgtgaacgtcacgaggggaatcgtcgttgccgggatcgtcggcatgaagcccatatatcgggatcgatcgtcttgcggtgcatcctgcggttccggggcctccgacgggcagactggtgtcgtgtagcaggccggcaccgcgccgcagcgtctctgcgtcagagctctggcggatgggcaagtcagtcgatatggtcgggatcagtatcctgccgatgaccgtgcccgaatctccggagccgttctgttgctcggcatccggttgcccgagatcgtattgtcctgaatcaatgagcctccggttgtatgcctgtgcttcgtcaaccgtcattccggtttcgttcgtcatgccggtttcgtttcgaggcgacgattgcatggaggacgcggttctccatgccgtgtcgccgacgacatcgaatccggtcactgtaccgccggcatgcctgacatcgtcatatcggccgatgcgcgtcaccgtgaacgcatgacccgcaagcgtgagattctccccggcgcgaagcgtgatgccgctcgtcgctgcatgcgcgggctccgagcgcaacgcgctgatggacatgacctgcggcaacatggccaacgccgccatgaccgcgaccgccgcagcccgcagtccgagacggccggcgagccgttgcgcgggcggcggcccaatcatgccgcacaggaatccgtcataggcagatgatacagtgaaattccatggttagaagacaacatggcaattctcaagaacacatcaccaagcacatcttcgttaccggtggcgtggtctcatccctcggaaaaggcctgaccgcctcctcactcggtcgtctgctgcgcagccgcggcatccatgtgctgcagcagaagctcgacccgtacatcaacgtcgacccgggcaccatgaacccgttccagcacggcgaggtctatgtgaccgaagacggtgccgagaccgatctcgacatcggccactacgagcgcttcctcgacgtgttcctctcccagaaggccaacgtcaccaccgggcagatttatcaggaggtgctgcgcaaggaacgcgcgggggagtacctcggccagtgcgtgcaggtcatcccgcacatcaccaacgagatcaagtcccgcatgcgcgcccaggcgagcgatgatgtcgacgtgatcatcaccgaaatcggcggcacggtcggcgacatcgaatcccagccgttcctggaggcggcccgtgaggtgcgtcgcgacctcggcgccgagaactgcatgttcgtgcacgtctccctggtgccctacatctccgccgcgcacgagctcaagaccaagccgacccagcactccgtgatgatgctgcgccagctcggcatttccccggatgcgctggtgctgcgttccgaccgcccgctcaacaagtccatcaaggacaagatctccctgatgtgcgacgtggatgaggagggcgtggtcaactgcgtggacgcgccgagcatctacgacgtgccgcgcatcctgttcgacgagggccttgacgcctacgtggtgcgcgagctggggctgccgttccacgacgtcgactgggacgagtgggctgacctgctggagcgcgtgcaccaccccaagcacgaggtcaacgtggcgatcgtcggcaagtacatcgacctgccggacgcctacctgtccgtcaccgaggccatcaaggccggcggcttcgccaactgggccaaggtcaacgtcaagtgggtcgccgccgacaagtgcgagaccgaggaaggcgcggccgccgcgcttgaccaggtcgacggcatcgtcatccccggcggtttcggcatccgcggcatcgacggcaagatcggcgcgctcaagtacgcgcgcgaaaacaagctgcctgctctcggcctgtgcctcggcctgcagtccatggtcatcgaatactctcgccacgtgctgggcatcgaggacgcgaactcctccgagttcgagcccgactgctccaacccggtcatcgccacgatggaggagcagaaggacatcgtcgccggccacggcgacatgggccacaccatgcgtctgggcagctacccggccgagctggaggaggactccctcgttgcgcagctgtacggcaccacgcatgtcaccgagcgtcaccgccaccgctatgaggtgaacgtggcctacaaggatctcctgcgcgaggggggcctgcgcatttccggtcagagcccggacggcgagctcaccgagttcgtcgagctgccgcaggatgtgcacccgttctatgtcggcacccaggctcacccggagttcaagtcccgcccgaccaagccccaccccctgttcgcggggctcgtcaaggccgcgctggatcatcaggaagcccgtcaggcctgagcgtgtggctttaagagtagactgatacgcgacgatggggatgcccgaaagggcatccccatcgttgtttagtgcgggtccggcgatcattgcgaagaaatcgcaatataagcaagctcacgttttgcgctaagccaacatgcgggtctgctgtggagttcgccgtgaggttctgctaacttaacgtaggaactatgtgatgaataggaggcagcgtcaaggtgagcgacacccagcaggcgcccaacgccgcgtccgacgtggagatgagccagtatgtggccgatcgccagcgtgtggacgaagagaaactcaaaaaggatgacgagatcatccagcaattcggtgattacacctacggctggcatgattccgacgcggccggcgaggccgcgaagcgcggcatcgatgaacaggtcgtgcgtgacatcagcgcggacaagggcgagccgcagtggatgctcgacatgcgtctgcgcggattcaaggcgttccttgagaagccgatgcccgattggggcgtggacttgagcggattcaacgccgacgacttcaagtactacgtcaagccgatcgacaagcaggccaagacgtgggaggagctgccggacgacatccgctccacctacgaccgactgggcatccctgaggccgagaaaagccgtctggtctccggcgtggccgcgcagtacgagtccgaagtgatttacaactccatccagaaggacctcgccgaccagggcgtgatcttcgtggacaccgataccgccgtgcgcgaataccccgacctggtgaagaagtacttcggcaccgtcgtgagccccgaagacaacaagttcggcgccctcaacactgccgcatggtccggtggctcgttcgtgtacgtgccgaagggcgtgcacgtggacatcccgctacaggcctacttccgcatcaacacgccggccatgggccagttcgagcgtacgctgatcatcgccgacgaaggctcctacgtgcactacgtcgagggatgcaccgccccgatctggtccgaggactcgctgcacgccgccatcgtcgagatcatcgtcgagaagcatgcgcgcgtgcgctacaccaccgtgcagaactggtcgaacaacgtctacaacctcgtcacccagcgcgcctacgtgcgcgagggcggcacgatggaatgggttgacggcaacatcggctccaaggccacgatgaagtacccggcgtgcattctcgccgagccgtacgccaaggccgagaccatgtccctcggcttcgccggcaagggccagtatcaggacaccggcgcgaagatgattcatctcgctccgcacaccagctccacgatcgtcgccaagtcgatctcgcgcggcggtggccgctccgcgtaccgcggactggtcaagatcgtcgacggagccgaaggctcgtcgaactccaccgtgtgcgacgccctgctggtggacgacttcagccgttccgacacgtacccgcatgtggacgtgcgtgaggacgacgtgacgatggcccacgaggccacggtctccaaggtctccgaggatcagctgttctatctgatgagccgcggccttgaggagaaggaggccatgggcatgatcgtgcgtggcttcgtcgagccgatcagccgcgagctgccgatggagtacgcgctcgaactgaaccgtttggtcgaactgcagatggaaggatcggtgggctgattcccatggcatcgaacaatactgaaatcaccattcccgtcgcggatccgaacgacccgtacgcggtgccggcggccatgccgtcgagcgccgacagggagccgcgctcgttcgacatgaatgatttcgccgcgccggagcgcaagcaggacgattggcgctacacgccgctcgaccgcatcggagagttcttcgacgtgttcaagccgagcggggagacgaccatcgcgatcagttacgccgatggcaccgcggtcgacgaaaagcacgtggccgtcagccagtgcgccctcggcgaaggagtctccggcacggtctccaagcccagcgatcgggcagccgccgtcgagtggaattccgggcgtaccgcaacggtgatcgagctgtcgggcgagatcgcccagccggtgctggtcaacgtgatcggcagcggcgacgacctcgatgccctgcatctggtcatctcgacggccgatgaggcccacgccgacgtcatcgtcgagcaccacggtctggcccgtctcgccgaaggcgtggaaatcgtcaccggcaagaactcccacgtctccaccaccttcgtgcaggagtgggagaagggctccaagcacgtcggcaaccagcgcatccacgtcggcgagggcgcatccctgcgccactccgtcgtcacactcggcggcgacgtggtccgtatccgcatggatcaggacttcggcggcgagcagggcgacctcaacatgctcggcatctacttcgtcgaccccggcgagcacatcgaacaccgcacgatggtggtgcacaaccatcccgagtgcaagtcccgtgtggtctacaagggcgcgctcgacggtaaggacgcgcactccacctgggtgggcaatgcgctgatcgcgccgaccgcgccgggcaccgactcgtatgagctcaaccgcaacctcgtgctcaccccgggcgcgatcgccgattcggagccgaacctcgaaatcgagaacggcaacatcatcggcgccggacacgcgagctccgtgggccgtttcgacgacgaggaactgttctatctgcagtcgcgaggtatccccgaaacggaggcccgcaagctcgtcgtacgcgggttcttcggagaactcgtcgaagagatcggcgtgccattcatcgccgaacacctgatgaacgtaatcgaccgccgcctcgcccgcggcgaaagcgacgccatgaaagccgtattggaggataagtaacgatggccgaacagcacactctcgaaatcaaggacctctacgcatccgtggagaccaaggagggtcgcaagcagattctcaaaggcgtgaacctcaccgtgcattccggcgagacccacgcgatcatgggccccaacggctccggcaagtccacgctcgcctacacgctggccggccaccccaagtacgaggtcgactcgggcgaggcgctgctcgacggcgtcgacatcctcaagcagacccccgacctgcgcgccaaggaaggactcttcctcgccatgcagtacccggtcgaggttcctggcgtgtcgatgaccaacttcctgcgcaccgccaagaccgaggtcgacggcaaggcccccgccatccgcacctggaccaaggagctcggcgccgcgatgaagaagctgcgcatggacccgaagttcgcgtcgcgttccgtcaacgaaggtttctccggcggcgagaagaagcgcgccgaagtgctccagctcgaactgctcaagccgaagttcgccatcatggacgagaccgattccggcctcgacgtggacgccctgcgcatcgtgtccgaaggcgtgaaccgcgccaaggagagcaccggactgggcatcctgatggtcacgcactacacgcgcatcctcaagtacatcaagcccgacatcgtgcatgtgttcgcagacggccacttcgtcaagaccggcggtcccgagcttgccgacgaactcgaagagaccggctacgacaagtacctgcccgaaggctccgactccgaatcggctctggcctgattccttcgtttcgttgcgtttgaggtgtggtcgcattgcctgggggtgtactattcccgaccgtaaacttggcccgagcggcctgaagcgatcccgggaacaggacatccctgcaccccgcggccaccgccggaagcatgatccaccgctggaagcggcgagcgaataagcggataactgaaaaacgacatatcggcaggacattgaatctaagggaaacaatggttgattttacggcgattcgggcgcagttcccgattctggatcagcagatccacgggcatccgctcgtctatctggattccgcggccacctcgcagaagccgcagtgcgtgatcgatgcggagagcgagttctaccgcacgatcaacgccggcgtgcaccgcggggcgcatgagctggcggccctcagcaccatggcgttcgaggacgcccgcgcgaaggtcgcccgcctggtcggagccaacgccgaggagggcaacgaggagatcgtcgtcaccgccggggccaccgcgggactgaatcttcttgccaccgcgttcggcaacgcgagtctgggccgtgggggagaggcggcgaaacggttcgctctcaagcccggcgacgagatcgtcgtatccaaggccgagcaccattccgtgctgctgccgttccaggagctggcataccgcaccggtgccacgctcaaatggttcgatctgaccgaagacggccgcatccgctcggataccgccgatgaggtgatcacggaacacaccaaggtcgtcgccatcacgcacgtgggcaacaccacgggtgccatcaccgacatcgcgcccatcatccgccgtgcccatgaggtcggcgcgatcttcatccttgacgcatgccagtcggtgcctcacctcaaggtcgacttccacgcgcttgacgtcgatttcgccgcgtggagcgcccacaagatgtacggtcccaccggggtgggattcctgtacgggcgccgtgagctgttggaggccctgccgccggcgaatttcggcggttccatggtcgagctcgcgtggatggaccagcccgcgcagtacatggtgcctccggcccgtttcgaggccggtacgcagccggtcgcccaggtggtcgcagccggtgtggccgccgaatggatgatgaacgtggggcttgagaacatcgaggcgcatgagcgcacgatcgccgccgaactgctcaagatgggcgacatcgacggcgtgcggattctcgggccgcgcgagaacgtgaaccgcatcggcacggtggcgttcgacgttgcgggcgtacacccgcatgacgtcgggcagttcatcgacgcgcaaggcatcgccatccgcgtcggccatcactgcgcccagccggtgcaccgccacttcggtctgtatgcgtcagaccgcgcatcctccggcgtgtacaacagcgtcgacgacgctcacgccctggtcgaggccgtggcgaaggtccgtccgttcttcgggctgtgatacgtgtcgcgtttacgccgttcgcgtatgactcccacgggatactgtcacggcatgtggcataatatccacggaatctcacgcggacggcgtttcgcgtgttcgtgaatgatatcgagcgctatcgagcgctatgcatgggaagggattgaccgatgggtgatttcggcatgagcggcgacgatcttgagcagatgtatcaggaagtgattcttgaggccgcgcgtgacccgcatggtcgtgagcatttcgcgacggacgtgtccaaggaacagggctccgcaccggccgacacgaccgtgcgtgccagccacgaatactgcacgccgggcgaatcccaccagttcaaccccacttgcggtgacgaggcgacggttcacgccgaggtctccgacagcgagccgcacaccatcgagcgtctggtgtgggacggccacggctgctcgatctcgcaggcgagcctgtccgtcatggttgacctgtgcgccggcaagaccgtcgacgaggcgatggagctgttccgcgacttccatgagctcatggagtcgcgcggcgctggattgcaggacgaggccaaggaggagaagctggaggatgccgtggtgttccagggcgtgtccaagtacccgatgcgcatcaagtgcgcgctgcttggctgggagggcatgcgcgactccgtcgccaaggcgctggcggcgaaataaacggtcaccgcactgccatgagagcggttcgagttgtactcttgatttaacggtttcgcgattaacgactggagagatatgagcgacaatctggttcctgagccgcaggcttccgtgttcgattcggtgagcaaggttctgggcgacgaggaggcggcgcgccgcgtgatggcgaacccgcagcttgcggctgggttccccaacggccatcctgcccccaaaagcgatggcggcgtcgagatgtgcgcgtgcggccgccatccgaagagcgagtgcgaggatggcgagcacagcagcgaggatgacattccgctcaaggccatcgacgatatcggccgtgccaccgccgaggatgtgaaggaggccctgcatcaggttatcgacccggagctgggcatcgacgtcatcgacctcggtctggtctacggcatcgagatcgatgagcttggacgcgcgatcatcacgatgacgctgacgacgcccgcatgcccgctgaccgacctcatcgaggacgagtgcgcgagcacgctggcgggtcttgtggaggagttccgcattgactggacgtggcagcctcgctggacgatggacaagatcacgcccgaggggcgcgagcagctggccgcgctcggtttcaatttcgacaacatgccgaagtactgacctcatccgtgtctgcggcttctctgtacggtcgaagacacgtgaatatagtcgagggggtttgccgtgaatccggcaaaccccctcaacgtatatccgagccgatcagtcgtccacgatggtgcccttcggcacgacggtgatgccttccggcgtcacggtgaagccgcgggcgaggtccttctcggtgtcgatgccgaccgtggagttctcggtcagcacaacgttcttgtcgagaatcgccttgtacacgcgggcgcgacggttgacgatgacgccgtcgaacagcacggagtcgaccacctgggcccacgaatggatgcgcacgttcggcgacagcacggaatgatgcacctcaccgcccgagacgatgacgccgggggagacgatggagtcggtcgcgtggccgagacgatcgcggccggcatgcacgaacttcgcggggggcagcgtgcccgagttcgtgtagatgggccatgcctggttgtagaggttgaactccggcacgtaggcgatcaggtccatgtgagcgtcatagaactgcttgatcgtacccacgtcgcgccagtaggcgtggtcggtcggcgtggagccgggaatgacgttggagttgaagtcgtacacgccggcctcgccgcgcgaggcgaagtacggcgcgatgtcgccgcccatgtcgtgcttggtgtccgcggccttctcgtccttggcgagcgcatcgaacagcgcgtccgtgttggcgacgtagttgcccatcgaagcgaggaacgaattcgggtcgtcgggcaggccttcggtcgtcgccggcttctcctggaattcgcggatcatgttggggtggttcgggtcaacgttgatcacgccgaactggttggactcctcaagcggctggcggatgcctgccacggtgaactccgcacccgattcgatgtgctgctcgaccatctggccgaagtccatgcggtagacgtggtcggcgccgacgatgaccacgatgtcgggctggacgtcctcgatgatgttgatggtctgatagatcgcgtcggccgacccgagataccagtgcttgcccagacgctgctgtgcgggcacaggggagacatagttgccgagcaacgacgagaaacgccacatctgcgagatgtgacggtcaagggaatgcgacttgtactgggtcagcacaataatatggcggtaatccgaattcaccaggttgctcaaggggaagtcgatcagtctgaatacgccgccgaacggtacggccggctttgcacggtcacgtgtcagcggcatgaggcgcgtgccttcgccgcctgccaggacgatggagagaatcttctgcttgttcttcgccatctgagtgctcctctcgttgttcacagcgtctgatgacaccgtctgcctgtccgcccctgcttcgttgccggagcctacagaaacaataattgcacatttccccgtgagcgcaaggaaatggcgttgcgcgtcatgaaaaagtcatgaaaaatatccgatctgttcttattgttccgcgcgcttcggggatgtcgcgtagaaggcgacggcgctggacgcggcgacgttgaggctgtcgacgccgtgggacatcgggattttcacggtcaggtctgcgcccgcgatggtgtgacgtgacaggccgtcgccttccgtgccgaagatcagcgccagtttgccgatgtggtccgcggattcgggactgttgttcagccggcgtgtcagctcgtccagcgatatcgagtcgtcgctcagcgccatcgccaccgtggtgaatcccagcgagcgcagttcctccagtcctcggcgcggccagaaatgcttgtcgtcgcctccgatgcgcgtccacggtatctggaagacggtgcccatggacacgcgcgcggcgcgccggtacagcgggtcgccgcacgacggggtgaccagcaccgcgtcgacatccaacgcggccgccgagcgcatcagtgcgcccacgttggtgtggtcgacgatgttctccatgaccgccacgcggcgagcgtcgcggcatgtctcctcgacgctcggcagcggccagcgccgcatcgccgaaagcgcccctcggtggaggcggtatccggtgagctggcgcagttgctcgggggaggccacgtatacggggatgtccgttccccaccgtttgtcgacgacgtcgaaggtctgtgacatgccctcgatccacggctcttcgaccagcagcgagatcggttcgcggcccgcggcgagcgcgcggtcgatgaccttgggcgattcggcgatgaacaggccacgctcgggttcgagccggttgcgcagctggatttcagtgagattcgtgtatgcggcaacccgctcgtcgtcgatggagtcgatggtgatgaattgcatgggcgtgcctcgggttctcatgtcgtcgtaccgtcgtcggcccgattgcgcgcggccgtctgcgcatacggtatgtatatatggaaagaccccttgtttccaaggggtctttgctggtgtccgggatgggacttgaacccacacgcctgtataaaataggcacaagcacctcaagcttgcgcgtctaccattccgccacccggacaggtgtcgttttcagacaacgagtagacactatatcggtattttcggatgatgccaaatcatggcgtgtcgcctgtgtttgcggggatgttgtagccttgtatccatgactgatcctgtattccttttcgaccctgacaccgatgatgtgccggtgaacggcgatggtctcaacgcggggtggacgatcacgctgccggcctcggtgaagcgccatgccttgggggccatgcgcctcgccgagggcgacgggctgtcgctgaccgacggtcgggggctgtgcgtcaagaccacgctcgtcgacgcgcaggccggtctcgtcagcgtcgagcgcgtcgggcggcagccgcagccggtcacgcggctcgtgctcatccaggcgctggcgaagaccggtcacgacgaggcggccatcgacatggcgacccagatcggcgtcgacgaggtaatcccctggcaggccaatcgttccatcgccaagtggaaggcgggccgtactgatcgcaaatggcggcaggtcctcgacgcggcgaccgagcagtcgcgccgcgtgtggtcgccggaactggcgcagtgcgtctcaagcaagcaggtcgtcgccatctgcaggcgcgcgtgcgtgcatggcgatctggtgatcgtgctgcaccaggacgccaccatgtcatggtcgtccgtggaggacgaggtctcgcggctcgccgaccgttgtctcgccgacgggcggccgcgcagcatcaatgtcgtcgtggggcctgagggcggcatcagcgaggaggaggtgtccgatttcgtcggggccggcgcccagagcgtggtgctcggctcgaacatcctgcgcgcatcgacggcgggcccggtggcgctgtcgctgctgtcgagggcgttggggcgtttcgcgtgaagccgagaatatcctcaatacgcaatagcatggaagcagatttccatcacggccagcaaggagcggcgagcatatgagcaagtccgaggactgcctgttctgcaagatcatcgacgggcgcattcccagcgagaaggtatatgaggacgacaccacatacgcgttcaaggacatcaatcccaaggcgaaggtgcatgtgctgatcgtgcccaaggaccactacgcgaacgtcgccgagctggccgccgccgatcccgcggaactggcccatatcgtcgggctcgctcagggcatcgccgacaaggagttctcgggcgcgtaccgtctggtgttcaacaccggcctcgacgccgggcagaccgtgttccacgtgcacgcgcatgtgctcaccggcgagaagctcgacgagtagggcgattcgtgacaacgacgacccgtaccatcaccatcccgtcgcagcttgacccggtggccgtcttcggcccggtcgacgaggtcatccggcaggtcgagcacgcgttccctgacctgaccatcatcgtacgcggcgacagggtggccatcgtctcccattcgaagtccaccgaatcgcaggcctctcgcgccgaagacgtcatccatacgattatccaggccgcgtacagcgccccgatggacgccgacaccgtgcgcaggctgctcgaccaggacgtgctgcccaacaaggtccgcgccgaacaccccggatacggcaggtccgccgagcggggccgtgcgtcgctcggtgcagcgcgttcaggggatgcgcgcaagcctcgtatacccggcgtcatcactttcgcggccgggcagcccgtgcgtgccaagacggcggggcagatcgcctacgtcaacgccgtggacgcccacaccatcaccttcgcgatcggcccggccggcacgggcaagacctacctcgccgtggccaaggcggtgcgcgcattccaggacaggcgtattcgccgcatcatcctgacgcgcccggcggtcgaggcgggggagagcctcggtttcctccccggcacgctcaacgacaaagtcgacccttatctgcgcccgctgtatgacgcgctgtccgacatgctcggccccgaccagctgcaccgctatctcgacgacggcaccatcgaggtcgcgccgctcgcgtacatgcgcggacgcacgctcaacgacgcctacgtgattctcgacgaggcgcagaacacgacggaacagcagatgaagatgttcctcacccgtctcggattcaacacgacgatgatcatcaccggagacgtcacgcaggtcgacctcgccgtgccgcgatccggtctggccaccatcgagggcattctgggcggcatcgacgacatagcattcgcccatctcgatgccggggacgtggtccgccatgagctggtcgggcgcatcgtcgaggcatacgaccgtcatgacgccacccgtgtcaggcgcaaccgaggcaaggaatcgcgggaggacgcacaatgagcgtggaagtgaccaacgagaccatctgggacatcgacgcaaaggcgttctccgacctgggcctgtgggtgatggaccagatgcgcgtgagtacccagtccgatctgaccatcctgttcgtggatcccgatcccatagccgagctgcatgagcggtggatgtcgctggaaggcccgaccgacgtgatgagcttcccgatggacgagctgaggcccggcgacggcaagaccacgatggagggcgtgctcggcgacctcgtcatatgcccctgggtcgcggcccagcaggcggccgcggcaggtcacagcaccatgcaggagatgatgctgctcaccattcacggcatcctccacctgctcggctacgaccatgtcacgccggagcaggaaaggcagatgttcggtctgcagcggcagctgctgctcacgttcctggccgtgcgccgcatcaccatcgaaccggccacactgccgaagggcgcggccgacgcgcttgccgaatacgacgcgtcgcacggcggcggacggcagataacggaatgacgcgtcttttcccgtcgccgttcggcggcaatgccgtcaccggcgctgaacacatgaactcaaacgaaggattcctatgccgttgaccgatacgtccacgattatcctggttgtcgcgttggtcgttgtcgccgcactgctggtctggctgtcgttgagcatggccgccgcggaaagtgcggtcgggcgcgtcacacgggcaggactgaacaacaagatcctcgaagtgcagaccgacaccgagacgagccagttcatccggatgaagaagatcggcaagatccataccgtgcagcggctcatcgccaaccggtacgccacctcgggcagctgcgcgttcttccgcatcacatgcaacgtgttcgacggcgtgctggtggcgtgcgtggcgtcgctgcttgatgcgccgatctggctgcagctgctgtgcggcttcctgttcgcgctgatcgtcggcatcgtctcggtgctggtccgcccgcggtccgcgggagccagcaagccgatcgacatcatgctcaattcggcgggactggtcaggttcgccaccgcgatcacgccgtttgcgaaggcgggcgagcagaagggccagaagcgtcgctccaaggagtcggacctgtccgacgacgaggagctggagaagattcagctcgaacaggggcgtgccaccatcgaccgcctggtggaggccaatgatttcgatccggaagtctccgagatgctgcgcaacgtgctgacgttgtcggagacgctgacccgcgagatcatggtgcctcgcaccgacatgatctgcatggaccgcacggccacacttgccgacatgctgcgtctgtgctcccggtccggtttctcccgcgtgccggtgatcggcgacgacgtcgacgatctgatcggcgtggcgtatctcaaggacgccgtgcgcgccacggcgttcaatcccgccgcctcgcagcgcgatgtcgcctccattgtcaggcagccgatgctggttcccgagtcgaagccggtggatgacctgttccacgccatgcagcagacccggcagcatgtggcgatcgtcgtcgacgaatacggcggcatcgccggactggtcaccatcgaggacaccatcgagcagatcgtcggcgaacttgaggacgagcacgaccgcacgcagcattccgagcccgagaagatcggcgaacgcaagtggaagatgccggcgaggactcccatcgccacccttgaggagatgttcgagatcgacatcgacgaggacgacgtcgacaccgtatatggcctgctcaccaagctgctgggccgcgtcccgatcgtcggctccagcgcggtgacgcgcggcctgcgcctcaccgccgtcgacacggcaggccgacgcaagagggtgtcgatgatcgtcgtggagccggcggccgggtcgcagggtcccgcagccgacgacgatgagccccgcagcgacgaacaggacggcgagtccgcctccccgcaaggcaaatgacggagccgtccgcccaatgacaaggtgaaccgctaccgtagagaaacaatgaccaaaccgaacgcgaagaaaaggcatgacacgaatatgaccaatactgacgagcaggaatcccagccggcgtaccgttccggattcatagcggttgtcggcagaccgaacgtcggcaagtcgacgctgatcaacgcgctgatcggcaagcaggtggccatcgcctcatcgcgcccggagaccacgcgaaaggcgattcgcggcatcctcaccaccgaccatgcgcagctcgtgctggttgatacgcccggcatccaccgccctcgcacgctgctcggccagcgtctcaacgacatcgtcgaggaatcgctgtcggatatcgacgccatcgcgttcctgctgcccgccgaccaggagatcggccccggcgacaagcgcatcctaagccgtctgcgcaccgatttcgccaccaagggcgaggacgggacgttcgcgtggaaggttccgctgatcgccatcgtcaccaagatcgaccagctgggccgccagcagctcatcgacaagctgatcgagatcaatgagttcgctgacttctccgacatcgtgcccgtcagcgccctgggacacgacaatctcgacgaggtccgccaggtgctgatcgacaacacccctgaggggccgcagatgtacccggacgaccaggtcagtgaggagcgtccggaagacaccatcgccgagctgatccgcggcgcgttcctcgaagagcttgatgacgagctgccccattcgctggccgtcgtcgtggactccatcgaacggcccgaagacaacgagagcgggcagtcatacgaaggcaagatccaggtcatggtctccgtgtacgtggagcgcgactcgcagaagccgatcatcatcggacgcggcgccgagcatctggtgcgtgtcaagaagaagctgcgcaccccggtcaaccgcatcgtcggaggcaaggccaagctcgatctgcatgtcaaggtcgccaagggctggcagtccgaccccaagcagctggagaggctcggcttctgattgcgcgccgcgtgggcgttggcaccgataaaacggcgtgaggcgggtggttcaacaatcgtgttgaaccacccgcctcacgcgtgaaggatgtcgagcgtcacttcttcttggtgtacatctgcgtgttcagcagtgtggcgtaacgccggatgaccttgggtcggatcaccttcatcgatgcggtcagcaggccgttctcctggctgaactcctcgggcaggatgatgaatttacgcaccgattcggcgcgggacacaccctcgttcgcctgatccacccacttctgcacttcggcgcgcaccgcggcgttggaggcggcctcctccatcgtcatatcgcggttgaggcccttggattccagccaggggcgcagcgacttctcgtcaagcgtcaccagcgcggagatgaacgggcgcttgtcgccgagcaccagcacctgcgagacgaactcgcagcgctggatgacctcttcgatcgggccgggggcgacgttcttgccgccggcggtgatgatcagatccttcttgcggccggtgatgtacaggaagccgtcgttgtcgagcctgcccaggtcgccggtgcggtaccatccgtcatcggtgaatgagccttcggtcgcctcctcgttcttgtggtacttcgggaacaccgcggtgcccttgacctgaatctcctcgtcctcggcgacacgcagctcgaacccggggaaggcgatgccgacggaaccctgatggtacggcacgccgagcgggttgaacgcgcacggcgcggtcgtctccgtcagtccgtagccctcgtacacgggcacgttcgcgccgcggaagaacgcgagcagttcggggtccagcggggcgccgccggcgacgatccactgggcgcggccgccgagcacgtcgcgcagcgtcttgtagacgatcgggtcgaaggcggcgcggcgggtcttggccagcacaccgaccttgcccttggcacccagctctttcatgtagttctgcgcggcgaccaccgcggcggcgaacgccacgcccttaggcccgtggccggccttctgggacgccgcgttgtacaccttctccagcacgcgcggcacgacgatcatcacggacggccgggcgacctgaaggtcggcgatcagcgtcttgataccctgggcgatgtagatcctgatgttgctcgccacgcagatgtagttgatcgcgcgggcgaacgagtgcgcctgcggcaggaacagcagcacggagttcttcttgttgtgcagcaggtccggcatgtagacgggcaggttcagcgcggtcgtgcagtagtgctcgtgcgtcatctccacgcccttgggtgccgccgtggaacccgacgtgtacacgatggagcacaggtcggtcttcttgatcgagtcgatgcgctcgtcgagctcctcgtcgctcaccgcggtcccgtacgccttgatctcctccaggccgccggtctcgatgcacaggatggtctccagcgacgggcattcctcgatcgcgccctctgccttgtcgcgcatgtcggcggtcccgacgatcagcagccgcgcgtccgaattgttgacgatgttgcggatctgctcggcggagtcggtgtcgtagatggtggcgagcacgccgccgcaggccatgaccgcagcgtccgtgacatcccacgcgtaggaggtacggcacatgaacgccacgccgtcgcccttcttcagcccgtagtgcagcaggcccttggcgacgctgcggatgtcggcgagcgtctcgttcgctgtgctggtgacccacttgccggagtcgtccttgtaggtgtacagcggctcgtcgcccatgcgttcggcgcggtccgcatagatgtcgtagatggacatgccctcgtcaagtggcgggttgccctcggtcttcgtggtgagcaggcccgtcgtgctgtcgatcagcgtcgtggtcgggtatcctggcccccattcggcggtgttcgggaggctgacctcgccgttcgcggcaagagcgtcgttctccgcgtaatccgggccgttggaggaatcgtcgccgatcgggtgcgcgaagtcacctcccaaacgaagtgccttctgcgtgatattcgcagcttgctgtcttactgaggtgaacaatgacacgtgacgctccttggaggcctgataatgcttaacacataaatattacccgtaaaaacgcctcttttcaccttacggtagcgtaggaaacagcgtcgtgcgggtcgcccgctcgcccgcggccattcgtcaggtgaaacggaacgcgccaaaagtcgattccttcggtacacttgcaacggtaagcaaagaacgcttgagttcgacgaagaaagggctctcatggctgaaacccagaaagccaccgtggtgttcggtgtcctcaacgagacatcgcaggacgaaacccgcgtcgcattgacgccggatatcgtcacacggttgaagaaagcaggtgtgtcctgcctggtgcagagcggcgccggaatcgccgcacaatataccgacgatgattacgccaaggcgggggccgaggtcgtcgccgcggacgatgtgatcgcgcgcgccgacgtgctcggattcgtggaccgtccgtctgccgagacggtcgcgcggctcaaggccggcacatgggtgatcggcatgctcggctcgttcaccgatgccgcgtatgtggacgccctccaggcggccggtcttgtcggtgtcgcgatggagaagctgcctcgccagctcagctccgcgcagtccatggacgagatgacgtcccagaattcggtcatggggtacaaggccgcgctggtggcggcgaacgcctatggctcgttcttcccgatgatgacgaccgccgccggcacgatccgcccggccaaggtgctgatcctgggcgcgggcatcgccggcctgcaggccatcggcaccgcccgccgtctgggcgccgtggtcaccgcgtacgacgtgcgtcccgcttcgcgcggcgaagtggagtcgctgggcgcgaagttcctcgatctcggtctcgacttctccaaggggcagggcgagggcggatacgcccgccagctcagcgccgaggagcaggccgcccagcagacggccgtcgaccagaaggcagccgggttcgacgtcatcatcaccacggccaaggttcccggccgcaagcctccgatgctgctgaccaaggccggcgtggacggcctcaagcgcggtgccgtcatcgtcgactgtgcggccagcgacttgggcggcaacgtcgagggatcccgcgtcggcacgcaggtgaccgatgggggagtgaccatcatcggtgccccgtatctcgccagcgaggtttccaacaccgcctcgaacctgctcgcccgcaacgtgggcgacgtgctcgcccacttcgtgcatgacggtcgtctgagcatcgacctgaacgaggaacttgacgacgccctcatcgtagccggacgtcccgccgcagaaagcaaggaataatccatggacatcatcgttgccatcacactgttcatactcgcgctgctcatcggcgtcgaggtcatcggcaaggtgcccgccaccctgcatacgccgctgatgtcgggagccaactccatccacggcatcgtcatcgtcggtgtcgtcatcgtcgccgcgcacgccacctcgctcctggcctgggtgttcatcttcctcgccgccgtgctcggcacgatgaacgtcgtcggcggttacgtggtcaccgaccgcatgctggagatgttcaagtccgacaaatcgaagaagtccgccgacaagaatgaggaggccaagtaatgggtacccttgctgaagtgctgagcaacccgcttggcgtcgttgaatggttcgtgtatctgctggccgccgtgttgttcgtcgtcggcctgcacatgatgaactcgccgaagaccgcgcgcaagggcaacctgatctccgcggccggcatggtcatggcggtggctatggcgttcatcgtgctgttcgtcaccgagatcggcaacggcttcgagcatctcgtcgccgtcgtgctgctgatcgtcggcatcctcatcggcacgatcgtcggcgtgtggagcgcgaagaaggtcaagatgaccgacatgccgcagctcgtctccgtgttcaacacggtcggcggcggcgcggcggccctcgtcgcgctcaacgacatcctcacctccgaggagctgccgacgctggtcgtgctgatcaccgccggacttggcatcatgatcggttccgtcacgttcaccggctcgctgatcgccgccggcaagctgcagggcgtcaagttcctgcgcaagctcaccctccccgcgaagggcgtgtggaacatcggcttcattgtgctcaccgtcgtctcgttcgtcatgctgtgcgtgcagcccgagcagcgtctgctgtggtgtgtgctgaccacggtgttcgcgctgtgctacggtctggtgttcgtcatcccgatcggcggcgctgacatgcccgtcgtcatctcggtgcttaacgcctgcactggcaccgccgtcgccatgagcggtctggcgatcaacaacatcgcgctgatcgtcgccggcgcactcgtcggcgcggccggggtcacgctctccctggcgatgtccaaggccatgaaccgtccgctgatgagcgtgctcgccggcggcttcggcggtggcgcctcggccggcggcgacgccgacggccccgagggcacgatgaaggagaccagcgccgatgacgtcgccgtgcagctggtgtacgccgacaaggtcatcttcgtgccgggcttcggtctggcgcaggcccaggcgcagcgcgagctggccgatctgggcgacctgctcaaaggtcatggcgtcgaggtgtcgtacgcgatccacccggtcgcgggacgtatgcccggtcacatgaacgtgctgctcgccgaggccaacgtgccgtacgaggagctgatcgacctcgacgatatcaacccgcagttcccgtccgccaacgtggccctggtcgtcggcgccaacgacgtgaccaacccggccgcgcgtcgccccggcaccccggtctccggcatgccgattctcgacgtcgacaaggcgcagaacgtggtcgtcatgaagcgcggtcgcggcaagggctatgccggcatcgagaacgagctgtacttcgagcccaacacgcagatgctgttcggcgacgccaaggccggcctgcagtccgtcatcgccgccgtgaaggagctcatctcgtaaccgtcaccgcgccggctcaccggtgcggacggagcgaaacgatacgggagtggcccgctggatggatttccagcgggccactcccaattcatattcagctcggcggagtgcatggcggcttcggccgggaagctgccgtcagagtccgaacacgcgggtgacgaaattcgtcaccgtcttccagtacaccaccggtgccgtgctggcgctcatggaatgacctgccgagggaatcagcagtttctgccggtcgatgctcgcacaggcgtcgaagttctcgtccaaagccctggacggcacgaaatcgtccgcgccgccgtggatgaacagcatcggaatcgtggcatgcttcagctgttccacgcacgaggcttcctggaaaccgtacccggcacgccgccgcgcgatcgcccccatcgtcgtcacgatcggcttggcgaggaacttcggcaggtgaaacatcgaccgcgcgcagtcgatgaactgctggccgaccgacgcatagccgcaatcctcgaccgccgccacgacgtttctgggcaggtccggctcgccgacggtcatcatgaccgcggccgcgcccatggacttgccctgcagcaggatgcgggcgtccgcgtcgctgccgatgatcagcgatatccaccgcatcaggtcgcggcgatccagccatcccatgcccgcatagcggccttcgctgagcccgtggccgcgcagcgccggaaccagcacggtgaacccgagacgggcgaaacgatgcgcgtacttcgccatatcctgtggttgccccgaatacccgtggcagcatatcgcatacaggtggggcttcgcaccggcgcaatcgggatcgaacagccagccatgaagctggatgccgtcctccgccgagatgaccaccggctgcttggactggtcgaaccaatccgccgcctcgacctcttcggccgcgtcgaggcggggccccttgtccgcgactttgccgtcatccccgccggatctgagcatcgagtgcttcgcctgtgcatccagcgcatacgagaacatgagattcgccagcccgtaagtggcgccggctaccacggaggccgcgattccgcctccaactactatccgtgatgtgttacgcgccattgcaaacctcccagctgattcggtgcatgtcccattgcgtccattgtagggcctcgccggggtcgatgacggcatgacgacgaaacagccgggcggatcgggtgttcgattcgtttgccgggatagacgttccatcgaatgtcccgcgcggccgtataattgtttctcgttgctttggcgagggcattccgattcgcgagaacgggtctgccgtaatcgactcggcgttgaataccacccctccttggggagttctgcggcgcgtcgtggcgtcaaatagacagaacgacaagtaacactcaaggagaaccattatggcaaacaccatcaagatcgccggtgacatccgtgacgaattcggcaagggcgctgcgcgccgcatgcgcgtggccaagctcatccccgccaccttgtacgcgggcggcgaccagccgacgttcgtgaagctcccgatgaaggagaccacgctggccctgcgccacacgaacgcgctgttctcgatctccttcggtggccagaccaagctggccgtcgtcaaggatgtgcagcgcaaccccgtcaagcgcatcgttgaacacatcgacttctacgaggtcaaggccggcgagaagatcgacgtcgaggtgccggtgttcgtcgagggcacgccgaagggtgccgccgtcgcgttcgtcgacctgcaggagctcaaggtccgcgccgatgtcaccaacctgcccgagcgcatcgtggtcaacgttgacggcctgaccgacggcaccaaggtgctgctcaaggacgtcgtgctgccggaaggcgccgagctcgacatggacgatccggagacctccgtcgtcagcgtcgaggtgcctgaggacaccaccgagtccgctgctgccgctccggccgctgacgccgatgccgctgctgccgctccggccgccgatgcggacgccaagtgatccgtctcgcacagcacatcggattcccgcgtgacacacgggagtgacgcttgagaaaagcccaccacaagcgtgggcttttttcataatgtgaacgagctcacgccgaatgcgtcatcggtgtgagaaagtatctctcagagccggtgccagaagcgccgactgccccatctggccgccgtgacgcaaacggcgacgttatcaaagaagtggttatgacagaaaacaatcatcacgattccgccgcgctggacaagctcaccgagccgttcaccgtgctgccgaacgacaatcccgcatccgacgcgaagcgccaggagctcatcgacaagccggcattcggtcaggtcttctccgacaacatggcccacatgagctggaccaagggcgagggctggggcgaccgtcgcatcgagccgtacgcgccgctgaagctggatccgggcgcatccgtgctgcactacgcccaggaggtcttcgaaggtctgaaggcataccgccacgccgacggctccacctggctgttccgcccggacgcgaacgccgagcgtttccagaactccgccaagcgcctgtacctgcccgagctgtccgtggacgacttcctcggctccgtggcggccctcgtcaagcgcgacgtcaactgggtgcccacccgccgcgagtacacgctgtacatgcgtccgttcatgttcgcctccgagccgttcctcggcgtgcgtgccccgcacgaggtcgactactgcgtgatcgcctccccgtccggcccgtacttcccgggcggcgtcaagccggtgagcatctgggtggaagacaagtggttccgcaccggccccggcggcaccggcttcgccaagtgcggcggcaactacgccgcctcgctgctcggcgaatacaccggcatcgacaacggctgcgagcaggtgtgcttcgtggacgccgccaccaagacctaccttgaggagctcggcggcatgaacatgatggtcgtgcacaaggacggccacgtggagaccccgtccctgaccggcaacatcctgccgggcgtgacccgccgttccctgatccagctcatgcaggatcgcggcatcgacgtggtcgagacgatgatcaagctcaccgacctgctcgacgacatcaagtccggcgaggtcaccgaggtgttcgcctgcggtaccgccgccatcatcaccccgatcggccgcttcaagtccaaggagttcgacgtgaccgtggccaacggcgaatccggcaagctcacgatcgacctgcgcgaccagctgctcggcatccagctcggcgaggtcgaagacccgcacaactggatgtggaaggtctgctgagcgcagtccagttctacgtgaagccccgcccatcggctcgatcgagcccggcggggcttttcgtatagaacccgctcccgctggcgggagctgtcgagcgtagcgagactgagggtggtttttatatgcccataaggattgcctgcggcagctgcgttgccgtcatctgcacgcggccatcggcaaccatgatgactggtggatggacaacaagccggcgctgaacctgttcgagagcatcgaaccgaacggcaccgttgaactggaaggacttggaacggtcaacctgtcgcacttcccatatcgcgaagacctcgcgtacggatggcccgatgacgcggtccgattccacgatcaggcgctgccgttcgacggacgcaagctgctgtacggtcacacgcatcagctgtctcccgcgggtgcgcggccggaatcgctcaacgtcaattctgcgcggactgccgggctccggtaagtcgacatgggcgcagaactgggtgtccgaccccgccaacacgtggccgcattgcgtgatctcgctcgacgccggctgggatgtggtcgccgacgcgcagcatgcgaacccggagtatgcgaatgagctggcgcggctcgccacacggcacggggcaatctggcggacggaggatttcgacgtgcccctggacgagctgctgcgccgcaacgaggcccggccgcgcgccgaccatgtgccggaggagtacatccgctcgtcgtggaagcggttccaccacgtgatgttccgcccgctcaatcccgaagacccgaacggcaacctgcttaaacgcatgatcgccgacccgtacgtccgggtcacaccggtgcgcggcgagagcgacgtattcgcctgcaatttcactcgagaggcgttcctcgaaggacgttggaacacgcgcacgatcaacgcccgcgggctctgaagtatgacacggtggtcgcgcacggcgacacatccccgggatcgttccccgtgcgcgtggagcgcaaggagaacggcatcgacctgacctatgagcgacagacgttcaaggaacgcgacatcggatcaaggtcggcgagatcctgacccggatcggagccgattctagtttcgggtagccggcttgcggtaggctcatgtacggccggatggttgtgatgttggcgaggagtggcacgtggaggaactggcactggaaagcaatgcctttttcatgggcatcgaatatcttgcggtgttctgcagcgggctgatgggcggtctatgcgcggttcgcaagaactatgacctgttcgccatgctgatcaccgcgtggctgaccgcgttgggcggcggcatcatccgtgacgtgatgctcggctccctgccgccggtgggcatctccgaccgcgggttcgtgctgaccgcactggtgtcgggcctggctatcgccgtgatccatcctgaagtggacaagctcagatggtcgatgctggccatcgacgccttggcggtcggcttgttcgcggtgaacggcacctcgaaggcgctcgatttgggaacctccggcatgacggcggtgttcatgggcatgttcaccgcgctgggcggcggtctggtccgggacatgctcctgaacgacgtgccgatgatcatccgcgacaagcacctgtacgcggttccttccgcggtcggatgcgtgctcaccgtgttcgtgtgcaggggagtgcaatggaagatgctggatttcacggccgaggtggtgctcgactgcgcgatcgtcgtgctggtcgtggtcatgcgtctgctgtcggtcaagttcagcatcatgcttcccggtgcggtcaagcggcacaacacgtatcttcccagcgagtcgcggtatctgaaacgcccggtcatccatcccgatgcccacgatggcggcgatgacgacaaagaccagtctcgggcttgacgctttcggaccacccccacccgcttcgcgggagcccccgctggcgggtgggggtggccggctaacacgaaagaacccccgggaaccttgcggttccgcgggggtcttatgctgtgacgaccgtcagacggtcatgctcacatgttgttgatggcgactgccatgcccgacttgcggttggcggcctggttcttgtgaatcacgccagcgccagcggccttgtcgagcttctgggaagcgaccttgtaggcggcttcggcagcggccttatcgccggcggcgatggcctcacgggttgcgcggatggcggtcttcaggctggacttgacggccacgttacgcttgtgcgccttctcattggtgagcacgcgcttcttctgcgacttaatgtttgccacgttttctccaaacgacgtttgctataaggacatacagggagtcatgctaccacgatgttcggataaaaccgaccccgtgttccgtgtgtcgtcgggaaattgccgacggtgaccggtaaacttagtgacttgcggcacatggcgtcacatttacgatgccaaaggcccgcgacgaacgagcaccacggacgaaaggaaccggatcagggtgattgagccgaagaacaagccagggtttaccgatcagtcgctaatccggaatttctgcatcatcgcacacatcgaccacggcaagtccacggtggccgaccgcatcctgcaactgagcggcatcgttcctgagcgcgagatgcgtgaccgcttcctcgaccgcatggacatcgagcaggagcgcggcatcaccatcaaatcgcaggccgtgcgcgtgccgtggaccttcgagggcaccgagtacacgctcggcatgatcgacacccccggccacgtggatttcacgtatgaggtgtcgcgcgcgctggccgcatgcgagggcgcggtgctgctcgtcgacgcgacgcagggcatcgaggcgcagacgctgtccaacctgtacatggccatcgaccatgatctggccatcatccccgtgctcaacaagatcgacctgcccagtgccgagccggacaagcacgcggaggagatcgcgggactgatcggatgcaagccgagtgacgtgctgcgcgtgtcgggcaagaccggcgaaggcgtcgccgatctgctcgaccacatcgtcatggaggttcccgctccgcacggcgacccgaaggcgccggcgcgtgcgctgatcttcgactcggtgtacgactcgtaccgcggcatcgtcacctatatccgtatggaggacggtgagctcaagtcgcgtgagaaggtgcacatgatgggcatcggcatgacgcacgagcccatcgagattggcgtcatcagccccgacatgacccccaccaaggcgctcggcgccggcgaggtcggctacatcatcaccggcgcgaaggacgtcagccagtccaaggtcggcgacaccgtgacctccgccgtccgccctgcagccgaggcgctgcccggctatcgcgacccccagcccatggtgtacgcgggtctcttcccgatcgacaacgcccagttccccgaactgcgcgacgcgctcgacaagctcaagctcaacgacgccgcgctcatctacgagcccgagacgtcggtggcgctgggcttcggcttccgatgcgggttcctcggcttgctgcacatggagatcgtctcggagcgtctggaacgcgagttcggtctcgacctgatctccaccgcgccgaacgttccgtatgaggtgaccgccgaggacaacaccgtgcaccgggtgaccaacccgagtgaattcccggacggcaagatcaagaagatcgtcgagccgatggtcgctgccgacatcatcacgccgaaggatttcattggttcggtgatggacctgtgtcaggaccaccgcggcatcatgggcacgatggaatacatctccaccgaccgcgtggagatgcactaccgcatcccgctcgccgagattgtgttcgacttcttcgaccagctcaagtcccgcaccaagggctacgcgtcactcgactaccatgaggacggcgagcaggccgcggacctcgtcaaggtcgacatcctcatccagggcgagaaggtcgacgcgttcagcgccatcgtgcatcgcgacaaggcatacagctacggcgtgatgatgaccaagaagctgcgcgagctgattccccgccagcagttcgagatcccgattcaggcggcgatcggatcgcgcatcatcgcacgcgagaacatccgtgcactgcgcaaggacgtgctcgccaaatgctacggcggcgacatcacccgtaagcgcaagctgctcgaaaagcagaaggccggcaagaagcgcatgaagatgctcggccacgtcgaggtgccgcaggaggcgttcatcgcggccctgtccaccggcgaggccggcaacgaccgcgacaccaaggataagatccgcgccgcgcagaagacggaaggctgatggaggtctttgatatgcccccgctggcgggggctgacagccgaaggctggctgggggtggtccagcgaatgaccgccttcagccggctacgccgacaacccccgccaacgcgggcgatgcggcaggctacgaaatctacatccatgtgccgttctgcatgcggcgttgcggctactgcgatttcaacacatacacggccacggacatgggcgcgggcgcgtcccgcggcaattacgcgaacatggtggtgcgtgagatgcgtctcgtgcgcgattggcagctcgtgcacggcatcgaggagccgcccgtctccacggtgttcttcggcggcggcacgcccactattctgccggcgcgcgatctggtcatgatgctggacgcggtccgcggcctgtggggcatcgaaccggaggcggagatcaccaccgaggcgaatcccgacacggtcgacgagcgctatatcggcgcgctcgcggaaggagggttcacccgcgtgtcattcggcatgcagtcagccgtgccgcatgtgttgaaaaccctcgaccgcacgcatacgcccgccaatgtggaggccggtgtcagggcggccgacagggccggcctgcgctccagcgtggacctgatctacggggcgccgggggagagccttgacgattggcgagactcggtgcgcacggcagtcgatcttggcgtgaaccatgtctccgcctatgcacttaccgtggaaccgaccacgaagatgggtcgacagatcgcggcgggcacattgcccaagcccgacgatgacgacgaggcagcgaaatacgagatcgccgatgacctgttcgccgcggcgggcctagaatggtacgagatctcgaactggtcgcgcccgggctatgagagccggcacaatctcgggtattggcgcaacgccgactgggccggcctgggccctggagcgcacagccattacaacacggttatgggcagctccacagacggtgacgccgcgaacagcgacgccgctggagacgtttcggcttccgtaacctccacatcgctgcgcggctgggacatcgcgcatccgcgtatgtgggggatggccatcaacgacgggcgcgtgccgtggtcgggcgatgagaccatatcgcccgcggagaaccttgaagagctcatcatgcttggccttcgcatccgggaaggactcgacatcgaccgcgtcaatcggcatatcgaagcggtgaaccgtgcgcaagatgcggcgcagggaacgctgcgcatcatcgacgacgcgtgcctcacgccactggtcggggatggcctcatcaccctcgacccgacgacgggccatgccgtcgccacgaggagaggccggttgctcaacgacgccgtcatcgagcgcatgttcggcgcggtcggcctgtagtggctccggcagtgaaacgtcgaagcagaccttgaccgtgccgaacttcaccttgctcacgatggagaatgcgtcacccaggctatgctggagatcggcgaggttccgaggtcgcttttcgtgatgagtgcgatgccgaaggattcgatggcgattcccgccagaaagcatatcagccgcttgatggaatacggcatgaatcatgactcctttcgtgtgttctgcccgatgtagtgctggaaggcaggtcgacgggatgcctgttgcgtcaggcttgaagattctcgattaccttgcgcagagagcttcgcagtctctcgcgttccgccgcggtctcgtaccgtgcagcttcgctgccgtgctagcaccttttggtttgtaagcaaactaaatatgtccatcggagaaaagttcaatacagataaaattgaactcaggttgttttgctgacaaagccgtgatattcttttgaaccagaatttgaactttgaactaacgtgaattgaggaagtcattggagagcttcgcgacgcggctgagaaccgccatgaacgcccgtcacctcagacaggtcgacatcgtgcgtgccgcccaggcgtcaggtgtcaaactcggcaaaagccacatcagccaatatgtcagcggcaagacgacgccccgcgcggatacgctcaggttcctcgccgatacactgcaggtcgacgggcaatggctgctcggccatgatcgcggacggcccggcatgccggcgcagccgaaacgggtgccggacaatcccggcggccgggccgacgcgccacgcacgccatcatcccaagcgcccgcaccccagacaacgtcaccatcacacgaaccggaaggaacacccatgcgctacttcaacaaatccaccaaacttgacaacgtgctgtacgacgtgcgcggaccggtcgtcgacgaggccgcccgcatggagcagtccggcatgcacgtgctcaagctcaacatcggcaaccccgcaccgttcggtttccgcacgccggacgaggtcgtctacgacatgtcccggcagctcagcgacacggaaggctactccgcatccaagggcctgttctcggcgcgcaaggcgatcatgcagtacgcgcagctcaagaacctgcccaatgtcggcatcgaagacatctacaccggcaacggcgtcagcgagctgatcaacctgtcgttgtccgccctgctcgacaacggcgacgaggttctggtgcccagccccgactacccgctgtggaccgcctgcgtcaacctggccggcggcaccgccgtgcactacgtgtgcgacgaggaatccgaatggtacccggacatcgatgacatgcgcagcaagatcactgaccgcacggtggcgatcgtcctgatcaacccgaacaatccgaccggcgccctctacccgaaggaggtgctgcagcagatcgtcgatctggcccgcgaacaccagctgatgatcttctccgacgagatctacgaccgtctggtgatggacggactccagcacgtctcgatagcgtccatggccccggacctgttctgtgtcacgttctccggcctgtcgaagtcgcacatgatcgcgggctaccgcatcggatggatggtgctcagcggcaacaagtccatcgcgaaggactatatcgatggcatcaacatgctcaccaacatgcgcatctgctcgaacgtgccggcccagtcgatcgtgcagaccgccctcggcgggcaccagagcgtcaacgactacatcgtgcccggcgggcgtctgtacgagcagcgcgaatacatctacaacgcgttgaactcgattcccggcgtcaccgcggtcaagccgaaggccgcgttctacatcttccccaagctggatgtgaagaagttcaacatcaccgacgacgagcagttcgcgctcgacctgctgcatgacaagcgcatcctcatcacgcgcggcggcgggttcaactggcatgagccggaccacttccgcatcgtctacctgccgcgcatcgaagtgctcaaggacgcgacgggaaagctcaccgacttcctcagctactaccggcagtagtcggcgggcatcacaatacgggtcgaaaaagccgttattcgtgattccccgtgtgaaatcgccgttttgaggctccgaaacggcgatttcacacacctaattgcggataacggctttttcgacccgtaattcgcaaagcggagaggggctcgaggctccccgccgtcacgtcctcgccgccgataggatggacgctatgaaaaagcacatcgtcgcgggcattctggctcatgtggacgcgggcaagaccacgctgtccgaagcgctgctctaccgttcggggcagattcgcaggctcggccgcgtcgatcacggcgatgcgttcctcgacaccgacgcgatggagcgggcgcgaggcatcacgatattcgccgagcccgccatcatccgatccggcgatctgacgatcaccctcatcgatacgccggggcacgtcgatttctccgccgagaccgagcgcgtgctggcagtgctggattacgccatactggtggtgtccggggcggacggcatccaggggcataccgagacgctgtggcgcctgttgcggcgatacaacgtgccgaccttcatattcgtcaacaagatggacgcgcccggcgccgaccgggccgcactgctcgcccagctgcgtgacaggttctccgacggctgcgtggacttcgagaacggcgctccgacccggtcgatggaagacatcgcgatgctcgacgaatcggccatgaacgagttcctggactccggcgccgtcgcggacgagcgtctgaaagccatgatatccgcgcgctcactgttccccgtgttcttcgggtccgccctcgccatggagggcatcgatggcttcctcgccggctttgaacggtataccaaggagatcgaaccgggtgctcgtttcggggcacgtgtatataaggtgtcgcatgacgagcatggcaaccgtctgacgtggctgcgcgtcaccgggggagagatcaaggcgaagatggtgcttgacggcgacgagaaggccgatcaggtgcgcctgtattccggtgcgaaattcaccacggtcgatgcgctgcccgccggctcggtctgcgccgtcaccggcctgacgcacagccgccccggtcaggggctgggcgaccagtgcgacgccgacgccccggtgctgcagccggtgctcacctacacgctgttgccgcagggggaggatcctcaccgttgcctgaccgcgctgcgagaactggatgatgaggaccctctgctgcatgtggtatggcaggagaggctgcaggagatccatgtgcagctcatgggcgcggttcaattggagatcatccagcagatcatgcgggaccgtttcaacttgaacgtcggcttcggccccggatccatcctctacaaggagacgatcgcccatgcggtggagggcatcggccacttcgagccgctacgacactacgccgaggcgcacgtgctgctggagccgggcgagccgggcagcggactgaccttcgccacatcctgttccgaagacgtgctggcccgcaactggcagaggctcatcctgacgcatttcgccgagaaggagcatctgggcgtgctcatcggcgtccccatcaccgacatgaagctcacgctgctcaccggccgcgcgcacgagaagcatacggagggtggtgatttccgccaagccacctaccgggccatccgacaggggctgatgaccgccctggtcgagggagacttctcccggcacgacctgttcgacgaggacgccgcggaggacgtcgccgaagacgcggccgcagccgatgccaaaacagcccggacggacgaatcggagccgtcggacggcagcgccttcgcctccgcggccgcccgcgatcccggctggtgccgggtgctcgaaccgtggtaccgcttccggctcgacatcccgcaggacatgctcggccgggccatgtccgacatacaacgcatgtcgggcacgttcgacccacccgagatggacggccagttcgccgtgctggcgggagtctgcccggtatccgagatgcgcgactacgccatggacgtgaacgtctacacccacggcacgggccatctggggtgcgtgttcgacggctaccggccatgccacaatgcggccgaggtcatcgaacaagcgggatacgatccgggagacgatctcgaaaacacccctgattcggtgttctgcgcgcatggcgccggttacacggtcaaatggtaccgggtgccggatttcatgcatctggatcacgcatacgacgccgggcagtgacgtcttcgccgggcaaaggggtccggcggcagtgacagtgatattcgtcacacttaacacgccattcacataagagacatctcattgacatgcgaaacgggtgccgcagattttccgaatcgcttgagaaacattgaaactgggtattgacaaacacctcgactcggtatatggacagcgaaacgtgtttgacatagccgagcggtactctttcctacgcactaacaaaagaaccgcaggttgtcaagatcctgccaaaacgatatgaaggtggtttcggtgactttccacgccccgctcgatttgagcatacataaatcacaaggtctgtacgacccaagctcagaacatgacgcttgcggcgtaggtatggtcaccacactcaacaagcggccggaacgtaagatcatcgacgacgccatcgaagtgctcgtcaatctcaaccaccgtggcgccgtgggcgccgaggagaataccggtgacggtgcgggcatcctgatgagcatgcccgacgagttcatgcgggccaccacgggcgtcgaactgcccgaggccggccattacgcggcgggcatcgcgttcctcgaccgcgacatcgccacgtccggccagcaggagcaggccatcgcgagcatcgtgcgcgaagagggtctggaagtgctcgcctggcgagtggtgccgaccaacccggacgggctcggcctgcaggcgctcgcctcgatgcccagcttcaagacgctggtcatcgccgacgccgaaggcaagctggcgggcatcgagctcgaccgcaggaccttccgcatccgcaagcgcgtcgagcatgaggtcggcatctacttcgcgtcgctgtcggcccgcaccatcacctacaagggcatgctcaccacgatgcagctcaccccgttcttccccgacctgtcggattcgcgcatgaaggcgaagatcgcgattgtgcactcgcgcttctccacgaacacgttcccgagctggccgctcgcgcagccgttccgcctgctcgcccacaacggcgagatcaacacgatccagggcaaccgcaactggctgtcggcccgcgaaggccgcctgagctccgaactgctcggcgagttcgagccgttgctgccgatcaccacgcccggctattcggattccggcacgttcgacgaatgcctcgaactgctgcacctcgccggccgctccctgccgcacgccatctcgatgatgctgccgccggcatgggagaacaacgaccagctcgaccccgacgtgcgcgcgttctacgagtacaacaacacactgatcgaaccgtgggacggcccggccgacatcatcttcaccgacggcacgcaggtgggcgccctgctcgaccgcaacggcttccgccccggccgctggcagctcaccgatgacggctaccttgtgctcgcctccgaagccggcgtgctgccggagatcgacgacaagcatatcgtctccaagggccgtctggagcccggaaagatgttccttgtcgacaccgacgagggccgcatcatccccgacgaggagatcaagaggaaccttgcctcgcagcacccgtaccgtaagtgggtcgaaggcaactccgtggagatgagcgacctgccgcaccgcgagcacgtgagccattccggccagtccgtgcagcgtcgtcagcgcgcgttcggctacaccgaggaagacctcaagatgctgctcacgccgatggccaacaccggcaaggagccgctgggctcgatgggcaacgacaacccgctgccggtgctctccaagcgcagccgcatgctgttcgactacttccaccagaagttcgcgcaggtcaccaaccctccgctggactgggagcgcgaggagatcgtcacctcgctcgaatccgccatcggccccgagccgaacctgctggaggattccgagctgcacgccaagaagatcctgatcccgctgcccgtcatcaactccgacgagatggcgcagctcaagcggctcgacaaggccaaggtgctcggcggatactaccgtccgttcgtcgtcaagggcctgtatcaggtggccggcggcggcaaggcgctgggcgagcgccttgaggagatctttgccgaagtcgacgaggccatcgcgggcggcagcaacttcatcgtgctgtccgaccgtgattccaaccacacgtggggcccgatcccgtcactgctgctcaccagcgccgtgcagcaccacctgctgcgcaagcacaaccgcacgcagatctcgatggccgtcgaggccggcgatgtgcgtgagatccatcatgtcgcgctgctgatcgcatacggtgccgcatgcgtcaacccgtatctggcgttcgaatccgtcgaggacctggcccgcaccggctacctgaaggtcgacgagcgcacagccgtgaagaacctgaccaaggcgctgtccatcggcgtgctgaagatcatgtcgaagatgggcgtctccaccatcatgagctaccgcggagcgcagctgttcgaggcggtcggcctgagcaaggacatcgtcgacaagtacttcaccggcacggtctcgcaggtcggcggcatcgggctcgacgagctggccgaggaggtggcgattcgccaccgcgtggcctacccgaaccagtggaccgccaccccgcacatgaacctcgaaaccggcggcgaatacaagtggcgtcgcaccggcgaggatcatctgaacgaccccgaggcgattttcctgctgcagcagtcaaccgcgcgcggcgactaccagatgtttaagaagtactcgcaccacatcaacgacacgtcgaaccgcattatgacgctgcgcggactcatgaagttcaagcacgaccgcaagccgatcgacatctccgaggtcgagccggcctccgagatcgtcaagcggttctccaccggcgcaatgagctacggctccatctcgcaagaggcgcacgagacgctcgccatcgccatgaacacgatcgacgcgcgttccaactccggcgagggcggcgaatccgacgaccgcatcgaggatccgctgcgttacagccgcatcaagcagatcgcatccgcccgcttcggcgtcaccagcgattacctggtgcacgccaccgacctgcagatcaagctcgcccagggcgccaagcccggcgagggcggccacctgcccggtgccaaggtcccgccgtggatcgccaaggtccgtcacgcgacccccggcgtggagctcatctccccgccgcctcaccacgacatctactccatcgaggatctcaagcagctgatcaacgatgcgaagatggccaacccgaaggcgcgcatccacgtcaagctcgtctcggagttcggcgtcggcaccatcgcggccggtgtggccaagtgccatgccgacgtggtgctgatctccggctatgacggcggcaccggtgcggcaccgctcaacgcgattcgccacgcgggcaccccgtgggagatcggcctgtccgaaacccagcagacgctgattctgaacggtctgcgctcccgcatcgtcgttcagtgcgacggcgagctcaagaccggccgcgacgtggtcatcgccgcgctgctcggtgccgaggaattcggcttcgccaccacggcgcttatggtcgagggctgcgtcatgatgcgcgcgtgccagaagaacacctgcccgcagggcatcgccacccaggatcccgagctgcgcgcccggttcaagggcaagccggaagcggtcatcaacttcttcatgtacatcgccgaggaagtgcgcgaactgcttgccgagctcggtttccgtacgctggaggaggccgtcggccatgtcgaatgcctggaccagaacgaggcgatcaagcgctggaagtccgacggcatcgacctgagcaacgtgctcatgcaacccggtccggttcccggaacgattctgcaccagaccatcgagcagaaccacgaactggagaaggcgctcgacaacaagctcatcgagatggccgaacccgcgctggagcgcaaggagccggtacgcatcgagatgccgatccgcaacgtcaaccgtacgctcggcacgatggtcggctacgagatcacccgccgctacggtgccgaaggactgccggacgacaccatcgacatgacgttccacggtgccggcggccagtcgatcggcgcgttcatcccgcgtggcgagaccatccgcgtctgcggcgaggtcaacgactacgccggcaagggcctgtcgggcggatgcctgatcgtacgccccgaggacggcgtcaccttcgacccgcacgagaacgtcatcgcgggcaacgtgaccggtttcggcgcgacctccggagaactgttcgtggccggccgtgcaggcgagcgtttcggtgtgcgcaactccggcgccacgttcgtggtcgagggcgtgggcgaccacggctgcgagtacatgaccggaggcaccgtcgtggtgctcggctccatgggccgcaacttcggcgccggcttctccggcggcaacgtgtacgtgctcgatctggacatgaaccaggtcaatccgaccgcggcgaaggacggctcgctgctgttcctaccgctggacgacgaagcacaggcactggtccacgatctggtgaagcgtcacgtcgaagagaccggttccgcattcgccgccggactcctcaaggattggaagcacaccgtcgcccggttcacgcacgtggtgccggaacactatctggccatgaccgccgccatggcgaaggccgaggaagacaatatcgatttcaacacgcccggcgcctgggaacaggtgtacgagcaggtgatggaaggagcgcactgacatgggagatcccagaggattcctgaaggtccgtacccgtcgcgaactggcggaacgccccgtcgaggagcgcatcaaggactggcttgacgtccatgctgagtccggcttgcagccgtggaccgccgaacaggccgcccgctgcatggattgcggcactcctttctgcatgaccggatgcccgctcggcaacatcatccccgagttcaacgatctggttcgtcaggagaagtgggaggacgcctacaatcgtctgtccaccaccaacaacttccccgaagtgaccggacgcatctgcccggcactgtgcgagaaggcgtgcgtgctcggcatccatcagccgccgacgatgatcaagctcgacgagcagacgatcatcgaccaggcatggggtctggatatcgtcaagcccatgcctccgcagcgtctgaccgaccagactgtggcggtcgtcggatccggccccgccggtctggcatgcgcccagcagctcacccgagccggccacacggtcgtcgtctatgagcgcgatgacgccatcggcggtctgatgcgctacggcatcccgaacttcaagctcgacaagcgactgatcgaccgtcgtatcaagcagatggaggccgaaggcacccgcttccgcacgggtgtggagatcggcaaggacatcagctgggacgatttgcgcgaccgctatgacgccgtggtcgtcgctatcggatccaccgtgccgcgtgacatgaagattcccggccgcgagctcaagggcattcacttcgcgatggagttcctgcccgacgcgacccgacgcgtgtacggcgtaaagcccgtgcacgacatcaccgccaaggacaagcacgtcatcatcatcggtggtggcgacaccggttccgactgcctcggcacctccatccgtcaaggcgcgaaggacgtgaccgtgctgcagatcatgccgaaggagccggacgagcgcccggacaaccagccgtggccgacgttcgcgcgtctctaccagaagacctcctcgatggaggagggcggcacttacgtgtacagcaccgattctgtcaacttcgtcggctccgacgaggaacaggcccgtgtgcacattgaggattccaccgcgtccgaaggattcgtggccgatgagaacggccacgtcaccggtctgaaggtcgtggatgtggcaccgggggagaacgggccgttcacccgccagcccggtaccgaacgcgtgctgcccgctgatctggtgctcatctcggtcggcttcctgcacccggacacctccacgctgctcgaccagctgcctgtcgaattggacaagcgcggcaacgtggcccgcaacgacaagttcgccacctctcaggatggcgtgttcgttgccggcgacgcgggccgcggccagagcctggtcgtgtgggccatttcggagggccgctcctgcgcggccgccgttgatgagtacctcaccggcgtcaccgagctgcccgcgccgatcaccgcatcccagcgtccgatgatgctgccgcgatgattcgacagtccggcggttcgccgtaccgacatctactgggggccggaagtctcttcaagggacttccggcccccagtcgcatatcgggcgctccctatttctggcgaaagtcccgtcccgttgtgtgccggtgggttctcgccggaggaatggcccgctcatgtgtgggtgagccgcagaaaggaggccggctatgtgcggggtggtacgtgtcgcggccacggctcggacgtcgtgattgccaacgattgcggatctgtctcgtcgtgcgagtcgaaccgccgctacggcacggcttggagtacagtacataggagtgttatccacaaacgagcaggagaagtaacgatgcctaaccgtgccgaacgccgcaaagcagcaaaagatcagcgtcggggagtcccgtcgcagtacgaccagacccgtggccgtgcccgatccggcatgctcgacgagtacgcgcttcaggagaagtcccgccgtattcaggagggcgtggatgacagcggcgtgtggaagcccagcgctcgcaccgaggtcgatgaggaagtggagtcggtgttcgaggccaacccgaactatcaggatcccaaggcgttcaaggcaccgcactccgtgcggcagtggttccgtgtcggcagctggacgctgatcgcgctgtcggtcatcgcgttcttcgtggtgatgtggctgcccacgcatccgctgtggctgatcctgaccgtgtccgtcgtgttcgtcgtcggcgtgctcagcctgttcttcacggccggcaactaccgcaacaacccgaacctggacgccaacggcaccgcggtgtgagagtctggtatccggtagttatctggtattatggcgtgatttttcgccaacacgaacatgggcattgtgcgttttttcgacgtgcaatgccctaaagttatatatggcagtagccgcaaacaaggttaccgacgaaggaggccttaatcgtgaaagttgatatcctcacccgcgaatacccgccgtatgtctatggtggcgcaggcgtgcacgcggaagagctctcgaaggtgctggccgagcgggtcgacgtgaccgtccgtgcgttcgacggaccgcgcaccgaagccgatgcacccgccatccccggagatggctcggcgaagggcagcctgaaagtcgtgggctacggaacgccctctgagctggccgacgcgaatccggcgctgaagaccttcggcgttgatctgcagatagccaacgacgtcgacgccgacatcgcccacgcgcacacctggtatgcgtgcctggccggatacctcgccaagatgctgcacggtacgccgctggtcatcaccgcacattcgctggagccgttccgcccgtggaagcgcgagcagctcggcggcggttataatctgagctcctgggccgaaaaggacgcctacgagcacgccgaccgcgtcatcgccgtctccggcggcatgcgcgaggacatcctcgccgcgtacccgaacctcgaccccgacaaggtcgtcgtggtgcataacggcatcaccatgagcgacttcgccacgccggccgacgacgacccgggctgggccgtgttcgaccgttaccacatcgaccgcagcaagcctacgctgctgttcgtcggccgcatcacccgtcagaagggcctgccatacctgctcaaggcgctgcacctgatctccaaggacattcaggtggtgctgtgcgccggcgccccggacaccccggagatcgccgaggaggtcaagaccgcgttcgccaagctcgacgaggaacgcggcaacatcatctggatcgaggagatgttgcctcgtccggagctcaacgcgctggagcatggctgtgacgcgttcatctgcccgagcatctatgagccgctgggcatcgtgaatctagaagccatggcctgtggcctgcccgtagtcgcctccgccaccggcggcattcccgaggtcgtcgtcgacggcgagaccggctatctggtgccgatcgaccagctgcgcgacggtaccggcacgcccaccgatcccgacaagttcgtgcacgacatggccgccgccatcgacaagatcatggccgaccccgaactcgccaagaagatgggccaggcgggctacgagcgcgcccgcgaccatttcagctgggagtccatcgccgacaagaccgtggccgtctaccagtccgtcctcgacgagcagaacaagtaacggcgatccgacgcaggcgggggcaaggaatgatgcccccgcctgcggggccgtaatgcgcggcatgaccggatggcacggcttcgcgaattaccgcaaccattccaaacccgcactgccggcaaacctccccacgacaaggaaccacaacatgcccacgaccgacaccgccgacaacgaagtcctcaagctcgacaacgtcgaattccgccgcaaccggcgcgtcatcatcacagacgtgaacctcatcatccacgcgggggagcgatgggtgctgttcgggccgaacggcatcggcaaatccaccgcggtcggcatgctcgccacgcgcacgttcccctcggacggtcgcgtattcatcctcggccatcagctcggcaaatacgacgtattcaaactgcgcacgcgcatcggtctggcttcggccgacctcggccggcagtttcccgaattcgaggatccgctggacgccgtcgtcacgggcctgagcgccgtgaccggacggtggcgcgacacctatactgacgaggagtatgcgcgggcgcgacagctgctgcgcgacttccgcgtctcctatctcgaaggcaaggagatgtggcggctctccgagggcgagcgcacccgcgtgctcatcgcccgcgcgttgatgggcgaccccgaactgctcatcatggatgagccgaccactggccttgacctgggcggccgcgagcaggtgatgcgcaccctgagccgtatcggcgaagaggattcgcggcgtgccgtggtgctggtcacccatcgacttgaggagattcccgcgggcttcgaccacatcgccatcatgggacgcaagccggtctccgccgaggacgccaccaacgacggcattgacgcgatgggcaacccgtccgccggcaccatcatctacaccggcccactggaggccggcctgaccgacgagcgactgtcggagctgttcggcatgccgatcgaggtgcaacacacgcacgggcgctggtcggcgttcgcggtatgagaccgaggcgtatcggtcgctggcgggattcatgaggaaccatgcccgcgcatctgatataacggtagccatgaatggcacgcaagagctgaaggtcgccgtagctcagttcacggttcgccgggagccggaatggaaccttgacattatcgacggatatgcctggcaggccgcggatgccggtgcccgcttgctggtgcttccggaagggctgatcgcgcgtgacggcgatgatgacatgttcgcggccgcacacgcgcaaccactagacgggccgttcgtcaccggcctgagacggatcagcgaagagcgtcatattacgctgatgggcacggttcatgctgtgctcggcgcggctgatgcggtgccggacaagccggcgtcttgcgcaacggattcccgggtctccaacgttttcgtcgtcatccgtgacggggctcttatcgcgacctatcggaagctgcatctctatgatgcattcgccgcgcgggagtccgatacggttcgccccggtatcgaactgccgccaatcgtcgagatcgacggctggcatgtcggcgtcatgacctgctatgacgtgagatttcccgaagtcgcgcggtcgctggccgtgcgcggcgccgatgtgatcatcgtcagtgcggcatgggcgcgcgggcgtttgaaggagcgacattggaagctgatgaccgccgcgcgtgcgctggaaaacacgtgctacgtactggcatgcagcgaggtgagcgcgcgcaacatcggctgcagccgtgtcattgacccgctgggcgaggtcatcgcgcaggcgggtgacggacagggcgaggcgggcggacaggccggaatgctgattgcccggctgcaccgagaagttctcgaatccgcgcgacgcacgctgccggttctggagaaccgacgcttcgcagacccgcaattgcgggattgacacaatttcccgtatgacgcgcatgcggcccgggaatcggccacacgcgtcgcacgacacgcccggattgcgctgcacgaatgtcaaagtgcaccgttgtacttcagcgatcccctgacgattgtgctgagcaatccgggcgtgtcgcgcttatcggaagcgcagatcgcgcgaatcagcccggtcggcatcggtcatgcgaacgaggcggaagcgggcgtgccgtactacgacgataccttcgatgaggacgacgaatgcaccacggccgacatcagcgatccggacgggtcgattgctctgggcctcagcggcatgtactacgaggagggcatgcactataccgccgcatcggaacggcagaagcgggtcgactgtttcagagccgccgagatcctttaccggcacgcggccggccgcggcaatgcgatcggacggctgtgcctggggtacgtgtacgcgtacgaccgctgcgagggtaggtacttccgctcgtattacaacaatttcggcgaagttccgccaaaaccggatacggacgttttggcatacgagtgctttcgtcatgcggccgaagcggggatcgcggagggctgctacaagctgggagacatgctggccgagggcagaggctgtgcggctgatcatgcgaaggcgctcgacatgttcctgcgggcgtacatgtgtgacggatattgcggcaggcacattttacacgaaatacatgattgaggaggacgatactatggatgaggtagccagagcggattcttccgcgggcaaaacttaagtttttcccagcaagtgacgcttaccatgaacacgcaagcaagaaaatcacggcaaatcatggaagggagtccatatgtgcactggtgttcgtttctccgacgatgagggaaacatgtatttcggccgtaatctcgactggagcttctcctacggcgagaccattctggtcactccgcgaggctaccagtacgactatgtgtatggggccgaaggtaaaagcgaaccgaatgcggtgatcggcgtgggcgtggtcatggtcgaccgccccatgtatttcgactgcgccaacgagcatggtctggccattgccggactgaacttccctggatacgcctcctttgcgcacgagccggtcgaaggaaccgaaaacgtcgctaccttcgaattcccgctgtgggtggcgcgcaatttcgacagtgtcgacgaagtcgaagaggcgttgaagaacgtgacgctcgtttcgcaggtcgtgcccggccagcaggaatccctgctgcactggttcattggtgacggcacccgcagcatcgtcgtcgagcagatggctgacggcatgcacattcatcatgacgatgtggacgtgcttaccaaccagccgaccttcgactttcatatggaaaacctgcgcaactacatgtgtgtgagcaacgaaatggcggagccgaccacttggggcaaggcggaactgagcgcatggggtgccggcgtgagcatgcacggcattcccggtgacgtgagttcgccgtcgcgtttcgtacgcgtcgcctacaccaacacgcactatccgcagcagaacaacgaggctgctaatgtgtctcgtctgttccacacgctggtttccgtgcaaatggttgacggcatgtccaagatgggcaacggccagttcgagcgcacgctgttcaccagtggctattccgggaaaaccaacacgtattacatgaacacgtatgaggatccggcgatccgctcgtttgccatgtccgacttcgacatggattcgagcgagctgatcaccgccgattgattccgggaatttcgagttcgaagattccagttccaaagattccgcagtgatcgcactatatggacagcataaaagtgcacaacgtcgcaacctgaaccgcaccccgattgttggactgaagaaattcagattcgatgatcggaggtgcggttcaggttgcgacgttgtgccttgatttttcattgctggtgcaacgcttgtggatgatgtgggcccatgtgttcccggtacgatggtgtttgcctgcgacaaccgggtatcgggaggtcccatgggccggtacgcccgtcttgccttggccgagcgcgaggaaatcgtgttgctgaggcgcggggggggagctgcggcgggatggccggagcggcgggcggggacgaagcgaccgtcagcggggagatggccggaaactcgttcgccgttggctcggggcggggctatcgtgcatcggccgcccagcgtggccgcgagtcccgaagggtttcctgcgtgcggcccggggtcctcgacggcgagcgaggggcggggcttgtgcggcgtcttgtcgtgcgggagcattggtcgtccgggcggatcgcgggcgggatcgcggtcgagcggccgggactgatggtctttgcgtccgctatctacagggcgatcaacgagcggcggcttgatccacccggcctgacgcgtacccgccgtggaatcagggcgcgtctgcgtcataaaggcaaacgccggcgcgggaggggcgggccggaggaacggcgtggcgagatcccgggcgccagtcccatcgggcagcgtcccgagatcgtgggggaacgttccgggcttggcgaccgggaaggcgacgccgtcgtcggcaaaggcgccggggcgtgcctcgtcacgctcgtggaccgcagaagcggtctgctctccggaggacgctgtgccgcgcatgccagacgcgacgttgccgatgtggggatcggcgtgctccgaaggcatccggagagccggaccgtgaccctggaccggggtatggagtccgctgacttcgagaaggtcgaacaggccaccggcgcggtgttctgcttcgccctgcccctccatccatggcggcgcggcggcaacgggaacaccgacgggctgattcgtgagtgtttccccaagggcgccggcttcaccgctgtcggcgagcaggaggtccgggccgtgtacgatgccatcgatcacagaccacgcaaacgccatggataccggataccctgggaagtccaccattcaacggtgttgcacttgctctgacgattcaagcaaagtaataatcgaaagatatagataattctgagtatcaatcataaaagcgtgtgtgtatctagcattcatgcggcaaattgatgaagcgcacccctaatgacatacaatatatgcgaaaacattgggattaagagcatatggggagcacacggcaatgaagcatggcgcgcattcggaacgagaactgctttctccaggcatgagagtgctgatccgcggccaggaatggcttgtggatagggtcgaactgaacagccttggcaaccatgccgtttcatgcactggtatctccgctctggtgcgggatgtgacggccacgttccttgatgatttggacacaattacacctgtcgatccggtgaagacgcgtttcattcccgacacctcggcaagagctgcgaaatcgcatctgttcatcgagagtctgttacgtgccactgcgccgaccgatgcgaggattcatgtcggccacaaggctgccatggactccctgccgtaccaactcgttccggcgaagaaggcgctcgcccaaccgcgccagcgaattctcatcgccgacgctgtcggtcttggcaagaccttggaggctggcatcctgatgtcggaactcatcaagcgccgcaaaggccgccgtattctcgtggtaacggcgaaaagcatgatggtccagttccagaaggagatgtgggaacggttcaccatcccgctgattagtctggactcctcgcgcatccagcagattcgttccgagatccccgcgaacgccaacccgttctcctactacgacaaggtgatcatctccattgatacgttgaagagggacatccaatatggcgcggcactcgatgcctcgtattgggacatcatcgtgatcgacgaggctcagaatgtcgccgaccgtgccgccaacggtcgcagcgcacagcgcgccaagctcgccaaacgccttgcttcccgttccgatacgttgattatgctgtccgccacgcctcatgacggccgtgcccgtagtttcgcttcgttgatgaacatgctcgacccaactactctgcccgatccggaacagtacgacaagcaggatgtcgaacacctgtacgtccgccgtttcaagaaggacgtgatggccgaagtatcgggcagcttcccggagcgcaaggtgacgcaggagaaatgcatggccaccgcggccgaggaagaggcgttcgattatctgaccgatatgaaactcgtcatggatatgcatcagaagagaagcaattccttcttgttcaagacgatgcttgagaagagtctgttttcatcgccggcagcgtgcattaagaccatcgacgagcgagtgaagcggcttgccaaaaaagatgcgtccgatcagaccggagacatcgacaggcttgaagggctcaaggccgctttggagaaaatcggtccgatgcagttttcccgataccagagactgctgcagcttctgcgcagtgccgattacggttggcataacggtgaagacgccgacgaccgtatcgtgattttcacggaacgcatcgagacgaagaactatctcgaggagcacttgcggcaggatctcaaactaccgaagaaggctatcgtctccatggatggaggcatgagcgatgtggaacagcagaaaatcgtcgaggatttcggtacgaagtcctcgtctgtacgcattctcgtggcctccgacgtggcctctgaaggtctgaacctgcactatctgagccacagactcatccatttcgacactccatggtcgttgatggtgttccagcagcgtaacggacgcatcgaccgttatgggcagcgtaaacagcctgatattcgtttcatgatgattaactcgcgtaatgcaaagattcaaggtgacacgcatattctcgagatcctgcagcagaaggaagaccaggcacgtaaggatatcggcgatccgtccttgctcatgggcaaattcgacgtcgatcaggaggaagattttacccgcgaagcgattgaatccggcgaatcagcggagaatttcgcagccagactttgtattcctgatgaggacatcgatcattcggacgaacgttccggagacgttgagactgtggcggatgacgatgttttcgatccactgagttttttcaacctcactacgccggatggtgccgatactgcgagcactgaggaaaacgagtccgcaggggagagcacggctgggagcgccgacgatggcggcatagtcgattcctctacgctgatgtcggattacgagtatgtggatgaggggctctcctgcgaggagttccggcagtcggctggtcttaagtcgaaacgtcagttgcgtgatgctcatggattcgcggtggagttccaagggaatagcccgttgcgcgcgtggctgcgcagacgtgtgccgaacacgcaggtgttgcgagacaacatcgctgaatggagtgatgacgcgaaatactgcgaagaccaagccaacggtctgctggcccgtatcaacgacgagtcatggagtcgggtccaatacctgtgggaattgaatccaatcacggaatgggtcgggttgaaggcttcctcactgctgtaccaacgtgacgaggccccgattattggcgtgaccaacggaaacctgcatgcggatgagacgattatgctgatgaacggcatggtcgccaacaagcacgcatccccggtgatcgatgaatggttcggtgtacggtatctcgatggcgaatgcatgggcatactgccacttgaggaagtgtggcgtatcaccggatatcgtgggaacttgattccgggaaccactgaacgtcgttatgtgagtcgagaggattccgcggccagctccgaacagatagatgcggcacaactgctgttggaggatgcggtatcgcgcggcaagagcatgctcagcgattgcggtgaacaatatcgtgcgcaggcagatgaagaagtgactcggcaaatggaccgcatcgagcgttggtcccatgcacgcaaggcactgttgcaatcccaaggcaaaaacaccaaggaaaacacaaaacaggttgatcggatgctcgaacaatatgccgactgggttcaggacacattggacgcctccggcgaaccagtaatccgcattgcggccgcattcgtaggtaaggaatagagggggagaccatggcgaaggaactgaacgagacgttcccaggcatcgaggcggtcaacgacttctacacgccgtactatatgaaggaatattttccggatgaagtgaagaatgcctccacaccttggaaacagcttcctcctgaggaacgcccagcgcgactgctgaaggacatgcgccagtcgttcaccgaagtcatcaacaacaacgagaacgatctgtttccagctgaacgggtacggaatttcatcgacgacatgctcgccgcactcggctatacgcaggaggggaatcaagccaaagacgagggattgcccgaccggatttcagggaagtctgttcctgtctactatcaggtcaatgattccgatggggctccgcgcttgcaagttctggtgagcctgtccgatagtgcggaggcaggcgttctggaaagccccatcgaagacggctccagcaaggacggcacctcctgtgaggaatatgcacgtatgctgcttgccgatttcgacgagccggcacggtggattcttctcatggggttgcatcagatagcgttgatcgaccgccgtaaatggaatgacaagaaatgcatgctgtttgacctggacgagatcttcagccgccatcaggatcatgtgtatacggcgatggctgtgctgttgcgtcgtgatagtctctgcccgaacaaaggtgacagtctgcttgacacgtttgatgacacgtctgcgaagaacgcggttgaggtgtctgacaatctgcgttccgcgttacgtgaatgtgtggagattcttggtaatgaggtcatccacgactggacttgtaataaggggcggagcatcgacgaaatcgacgcgggcgatctgacagtgcaggcgttgcgatacatgtaccgtctgctgttcctcctgttcatcgaggcgaagccgtcgctcggctacgcgccgatgaaatccgacatctaccgtaccggctattcgctggacagcttgcgagatattgcggaacagatgcgtggctgcatggatgaggctggcgattccacctatctagcgtacacattgcgccgactcgacgatctggtattcaatgggtatccgaagacggacgaacagttcaaaggattgtccgccgaggaggccaccaacgcggtgttcatggtgccaccgctcaaggcgcacatcttcgacccggaacggaccgcgctgatcgaacatgccgcactccgcgacagcgtaatgttgcgcatcgtcgatttgatgagcgtcaccaagacgggtaagggagtcaaacgcaggcagcgcatctcctatgcggccctgggcatcagccagatgggtgccgtgtatgaggcattgctgtcttaccgtggtttcatcgccaaggagaaactctacgaggtcaaacgagccaaggattcctacgaccctttgaaagtcggctattttgtgccggaacgagaactcgacaattattcggaggccgagcgtgtacgctacccggacaagagcctgcatgccggcgagctacgcacctacgagccgggcacattcatctaccgacttgcaggccgggaacgtgaaacgtcggcctccttctatacgccggacagtcttgcgcaatgcctggtgaagtacgcgctcaaggagattgagccacgtgtccatcaagccgccgatattctgagcctgaagatctgcgagccggctatgggctctgcgaccttcctgaacgagaccatcaaccagctggccactatgtatctgaaccgcagggagaaggagcgggttgctgaggaaggccagaaggcggcgattcccgcggaacacaggcaggctgaactgcagaaggttaagatgtacatcgccgaccacaacatctacggcatcgacctgaaccccgtggcagtggaattgggagaagtgtccctatggctcaacaccatttgcgaaggatccttcgtaccatggttcggcacccagctgcaatgtggcaattcgctgattggcggccgtcgcgtcgggtattcggaatcgaatctggccggcgctaccaaaaaccgccactggtatgaggtcgaacccacgcatatcgggttcaaccagagttcgtcatccgtcaagcgcatctaccagttcctgaccggagatccggacatgtgcaagtatgatgacaagaccgtcaaaagcatagaatccgaacatctggaaaccatcaaggcttggaagaaggaattcgccaagaagccttattcccagacggagattggtctgatgaggtcgttgtcaaagaccatcgacgaactatggcgcggccagatcaaagcgcgtcggcaattggaaaaggcgactcaagacgatttgattatctacggttttgacgcgaacgtttccaaaaagaccgcgaaggctttggaaaaccagcagaagcatgggcaggggttgcttggcatcgaaaatgaatacttccgtggcaacaacctcaccattcgcgagaaagatgagatgcttcgcattgcctaccattcggaaaaggctgagaacgccagcgaatacgctcgtttgaaacttgccatggactactggtgctcgctgtggttctggcctatcgatcaggcgggtctgctccccacaagatcgcagtatctcacggaaatgtcgctgatcctcaccggcgagattccacaggaagagggattcactctgatgtcgatggataacaatcagcccacgcttatggacaccatggacgatagtcatgaacgcgactacatgtatgaccacactgtggatctcgatgagctttgcaaaggtgatggggaaccagcgcaaaggcttcgcttggtgaaggaaatcgccaagaagcagcgtttcttccactgggagctcgaattcgccgacgtgttcaaagacggcggcttcgacttcatggtcggcaacccgccgtgggtgaatgtgcagtggagcgagacggatgccgtttccgatgcgaatccttattttgcgattcataagcttacggcttccgatctgagtaagcgtatgggtgaacttctaaagaacgcacgtatacgaattatgtatcttcgggagtatgtgaatattgccggtgctttggcattctatggttcagtggggaattacccactactacagggacgaaccaatttgttccgctgtttcctgccgaatgcctggagctatacgcgtgcgcagaatggcgtaagcgcatttgtccatccagatgaggtttatgcggacacgaaggctccacttcttagaagagaaatgtatcgtaggatatgtagccatttccattttcagaatagacttaatttgtttgcgggcgtggacagcaatgcgcagtttagtctcaatatctatagaaataaaattaattcaagcatttcatttgattcgatttggaatttgtatgcgccgtccactatcgatgaatgctatgcatctgatggtagtggggacgtgccgggaactaaagatgataattggaattgggaggtaaaaggccacaagaatcgtattatccacattgaggaatccgagcttaaaacttttgcattgttgctaagtgaacagggaacaagttcgtggagaaacaccccgcttgttgctgtgcatgtgcaagagctttttgatgcaatttgtaaaatggcaagtgtatctcgttgcttacgtgattatggggaagacataacttattcgagcatgtggaatgaaactaacgcacgtaaagacggtacgatatgtgacgaagttcattttcccagtgtcgatgaaaaaataatttattccagtccattccttggcgtcgccaacccccttatgcaaggtgcgaaaagaaattggaagacgaggaatgactatgatttgcttgatttgatggagataaatgattcgtttgagccgagaacgaaatacagacaagcttgtaccgattttgagtaccagcaaagactcccgaaaatgtctgacggaagcaatttcgatgctgtttatcgcctcgcatgccgtcgtatggttaatttagttagtgaaaggacgctgcaagcgtcctgtgttcacccaggcgcagcctgggtgaacaccataacaggttatggtgtgcacccagagcgctacgcgttgctcgcgctcatgagcggcctcgaggccgctctgccatatgattttctcgtgcgctccattggcaaaatggatattcatagctccacgctgcagctttttccagttccagaaacaattctggctcccgaaattcgtctccgcggtctgttgctcaactgtctgaccaagccatatgcagacctgtggcaatcctgctgggacgagtcgtatacgtccatgagctgggcgaaggatgatcctcgacttaccgccgatacgttcacctcattgatgaatgagtggaactggcatacgccattgcgcacggactatgaacgccggcaggcgttggtggagctggacgtactggcatccatggcgctcggcatcaccttggacgagctcatcgacatctaccgtctgaccttcaccgtgctgagcggctacgaggacgacacttggtacgacgcgaatggtcgtatcgtgttctctaagaagaattacggtgatttgactttcaaacgtcctgatttcgagaaaatcaagaacgcgcctgcgggcgaggtgttcacccgcaccatcacagacgacacccagccgggtggaccacgtgagcggaccatcgaatatgtggcgccgttcgacaaatgcgatcgcgtagaggattacaaaaccgcgtggaagttcttcacgcagaagtatggagataacaaatgatccccatggtgcttgcacggcatatccagtctggactcgccgattacgtggagaccacgttccccatgaccaatatgccgttccgcggctccatccgcaaactcgcccatcaggaaggcatgctttcccaggagccgttcgtatcggtcaaactgccgttccgagtggtcggcaaacatgcggaattcccgttcccatgcttgcaccccacgtaccggccatacgcgcaccagatgcgcgcattcgaacgcatctccgccggtgaatccacactggtggccaccggcaccggctcaggcaagactgaatgcttcctgtacccgattctcgactactgctaccggcagcgcaggcttgggcgcaagggcatcaaggccatcctcgtctacccgatgaacgcactcgccaccgaccaggcgaaacgattggccgaactcatccacgacagtccggaactgcgccacaacgtgaccgcgggcatgtatgtgggccagatgagccaaggcggcagcgacaaggacaaccacgccatgaccgccaccaacatcgtgaccagccacgatgagctgctcaagaacccgccggacatcctgctcaccaactacaagatgctcgactacctgctggtacgccccaaagactcccggatttgggacagcaacgatccgaatacgctcaaatacttcgtcgtggacgaattgcacactttcgacggcgcgcagggcaccgacctggcctgcctgctgcgtaggctcaccgacaggctgaacaccaccagcgacgacatgtgcttcgttggcacgtcggccaccatgggcaccgaagagacagtacgtgacgtctgtgagtatgccagccaaatcttcaacaccacgttcacaccggaatccgtggtgaccgaggatcgtcttcgcgttgacgaattcttcgtcaccagcgactatgacgacaccatgcctactgccgcgcaggccgatcgactcatcgaactcgaagagggcgtcgaccccgacgaataccttgccgatgcggcccaagcgtggcttgacgaagcccccacagagccggtctccgcagacaaggcacgcatccggctcgccgaatccctgcgtcattcaaggtttctggccagcctgtcctcgcttatctgcgacgaacctcagcaaatcgatcgcaaactgctggacaggctcgccatcatggatgcaaggttcaacgccttgcatccacgccagcagaaggcctgtgtggacgcgctgatagcgctcgtctcccacgcgcgcaccggttcggaggagcacgcacgtccgttcctgaacgtacaggtgcaactatgggtcaaggaacttggccgcgtggttgccaacatcactccgcaggaagggagcatcgactaccgtccggtcgtcgaactgtccaaagacgacctcaagacccgcatgccggtgattaactgccgtgattgcggaggaaccgcatggatcggacttgccggcaaagacggcggtattagtatgggtgaccctcgaacgttctacaacgagtatttcgcctaccatgccgacaatgcgttggtgactttgcaaccctgcaccatggattatgttcttgacccgcatgccgacaacggagccatggtctggttctgcaatgcatgcatgaaggaacaggtcgtagaacgtttcgaatccacggaacgtgaatgcccggcctgtggagagcagcgcatacccatggtcgctaggggcatggagcttgtatccggcaaccgcaaacactatcagtgtccgttctgcggcagcgaacaggacatcgccatggtcggtgtgagaaccaccacgcaggtcagtgtgatgctcacccaactttccggagactccttcaacgacgacagcaaggccatcgtgttctctgacagcgtacaggacgcatcctatcgagccagcgtgttcaactcccgcacctggcgattcgccctgcgcaactccgccatggactacatgcgcgaggaacacaaggacggcgtcttcctcgccgaatatctcaacagccagaacgactactaccatcgccgctatccggacgacaacgaatacatcgtgcgattcatcgcgccgaacatgacatggatgcgcgaatacgaagccgtgttgcaaggcaatcccgcagggcccggtcgccgtcagctgctcgattggatcgagcgcagactccgactggaatcgctgctggaattcggcatgcgctcccgtaccggacgcacgttggagaaatccggctgcgccgcaatagcattcgaccagaatctcctgaaacgtgtggcacagaccgttgccgaacgttgccataacgagatcggactgcacgagaattccatcatggagactgactggctccgactgattatggcgttcctcgaccagctgcgcacgaaaggcgcgttcttcgacgtgacctacgaccagttcctgcaaaacgacggcaacaagttcctgctctccaacacgaacatcaaatggatgcccggcatgtacgcggatggcatgccctacttcctgtcggacaaggagccagtgcgcaaaggcgttttcaataccctgaattcgccgtcataccgtcagatcgtcgaccggtacctcaccgacggcgcccttgaaggcgacatccaccacgagctgttgggaatcgtgctcgaagagtgcatagcagcagaattcatcacgcagcaacgttatccaagcatgaaaatggaacgcaccgtgtacgggctcaacgagtccggctgcacggtcagcggcaaggtaacgcaactgatctgcgacacgtgtggacggagctattcgtgcgccacgcagaaccttgacgcgtggaacggagcacgttgccgtatccgcaaatgcccgggaagactggtcgccggcacttccgaagccgaagctctggaattgcgctactacggcaagctgtaccgcggggagccaaccgatcgcatccacgctgccgaacacacgggactgctcaacggcgacgaccgcgccaaggtcgaagaggaattcaaacgcaagaaccgcaagcccggtgacgtgaacgtgctagcctgtacgccgaccctggagatgggcatcgatatcggagacctctccacagtgattctctcgtcaattccgcctacccaagcccagtacatccagcgtgccggtcgtgcagggcgacgtgacggcaactccttggtgctggcggtggccaataccaaggaacacgacacgtacttctaccagcggccgaaagatatgcttggaggcgcggtgaacccgccgcacatcttcctcgacgcaaccgcagtgttggagcgtcagctcaccgcctacgcattggatcgttgggtgcatgccatgctggatgccggcagcgaaccggccgatgtggtacccgacaaattgaaaaactgtttggataatgtcaacggcagcggctccagcgggttcccggtgaatttcctgaactggacaggccaacattccggcgaactgctcgacggattcggaagaatgttctcattctccgaggaactccgaacgcagctcgacggattcgtacgcggtacggaagatggcagcaccatggccagacgcgtctacgatgtgttccaaaaaaccaacgataccgtcagaacgctggaatcgcagaagagtgctgcgaggcagctgctcgacgagctcaagaagaagccctccgactcatcgttcgaagagcagcagcgcgaatgcgaagatgagattcacaatcttggccgcatcgtcacaagcattctcaacaccaacacgttcaactacctttccgacgaaggcatcctgcccaattatgcgttcccggaaaccggtgtgaccctccacaccatcctcaaagaggacaaggaaccgtccgatgcggcacacggaatcgagcctgccgcgcaggacaagacgaaacgcagggggaaggccacgcgtgacttcgtgcgcccggcggccacggccatcacggaactggcgccgggaaacacgttcttcgcgggcggacgcaaatacaaaatcagccgcgtgctatgttcgaaaggcggtgccgacgacgaactggcaatgtggcgcctatgcccgaactgttcgcacgcggaacccgcctccagcaccgagaacctcgccagctgtccctcctgtgggtcaatgcagtgggccgataacggccagaaaaggccgatgctgcgcatcgacaccgtcatatccgatgagacctacagcgaaagcctgattgaggacacctccgacagcagacccaagacccagttcctgaagaatacgatggtggacattgatccggcagacatccaatcgggatggcagttcaagggaatcacgaacttcggattcgactacacgccgcagggcacagtccgtgaaatcaacttcggacaggtttctgataggggagcctcggtggaaatcgccggtagcaaggagatacgtaacggtttcaacgtgtgcctgaaatgcggtgcgttgctcggcgagcgcgaatcacggcacgcctacttctgtccggaacgcaagaaggcgcaggaacagcagttggagcaatcggagcggaatggcacgtgcctgttcctataccgtgaggtcaaatcggaagtgctgcgtatgctcgtgccagggcttgccgatgcccaaggtgcggacggtgctgcggagtcgttgaccgccgcagtgatgcttgggctgcgtgaacgcttcggcaacgtggaacatctacaggcgacactcatgaacgagccgttgccggataactccggactgcgcaaaacctatcttgctctgtatgacacagtgcccggaggaactggctatcttaagcagctgtccgatccggatacgatgttcgaggtgttttccagggcaaaggaagtcatggagcattgcgaatgtgcaaagaacggcggcgacgggtgctacagatgcctgtatgcatacagacaaagccaggacctgaaacttatttcccgtaagaccgcgctggcgatgctcacgggcatcctcgacctggccaacaagcgcagtcgtgtgacaaccgtttcgaagatcaacacgaacaaactgttcgacagtggactcgaacagcagttcatcgaagctctccggtgcatgcatgcccatcccttcgcggaatccgacgatgccaagggacgtcgtgccatcgtcaaggacgaattcatcaatagcaaacctggatattccatcaccgtgaacggaagcgtgtggagcgtcgagccacaagtcgcgctggggccggccgatggagtcgcgattccctgcaaacccgatttcgtattgacggtcagcaatatcgacgaatccggtgacgtggccgagcatgacggaaggaagccgattgccatcttcactgacgggctgcaatatcatgcaggcatcgtcgcccaggattccctgaagagagaggcgcttcgtcaagcaggttaccgtgtatggtccttggattatgacgatgtgatcggatatgtgcagggcaaggatgcggcgcagctcgccgatacgatgctaaccaccaagaccatgccgtcgccagcggcttacaagagcgcaatcagtggcagggcagacgaattcgaccccggcgaagttccggcaatggccatgctggaatattatcttgcggaaccggatgccgaacggatgttcaccatccaagcgctggcgatgagctatgccctgaatccgcggagcaagaacgtcgaacctcaggccgtggatacgctgcatcggatcgaagcactacacggcgagaacgaatcggcattcatgatctgctcgtcctggagtccttcgaactgtacaagactgaaattccaatccggtctgcgtatcggagaggatatgcggaccaccgaacctcacgtcggtatgatgttctcggacgttcaacacgatgccgtgaagacgaagaacgatgattacaatccgttgaacgctctggacgagaacgaggcggtagcattcaaaacgcaatgggcggccttctggcattttgcgaatgtgatgcaattctcggaatacttccatgccatcggcgatgccgcgctgagtgacacgaccatgtacgagccgcttcgcaacggtttgcggaatattcctgacgtgcaggaaagcaatgattccgcgtggaacgatgtcctggcggatccgacctatgtgtattgtgcggatgagaccaaggaagccgtcaaacggtttatcgagtctgacataccggcaccggatgtactcggatatgagctgctggacgagaacgaggaaatcattgcgcaggcggagctcgcatgggaggatgggaagatcgtgtttttcccgtcctacgacttgcaatccgaccgagagaacgtcgacgaattcgtcaagcgcggctggactatcattacagaaaacagcgatgaccttgacaaggtgttcgcttcactgacggaaggtgaggaacgttgatggcagatatacgtacgatgaacaaacccgtggtcgcgcttggccgtgatcttatgggcagcttgttcgatttgccaaagaaagcgcagaaacatgccacgacgtttctgacaaaattccagacgaatccccgatcatcaggaatcaatctggaacgaatcgccaatgcggcggacgaaaaactgtattccgcgcgcatcgaccaacggtatcgcgccatcatcgctttccagaaaagcagcaatgtgtacgtcctgctgtacgttggcgaccacgatgacgcctacaaatgggcggaaacaaagaaactcgacgtcaacccgaacacgagggccatccagctgtacgatatggtttctcaagaggaaatcgacacggcaatgcgtgaagattcccagagcgaagttggatgggggagcgttgccgcaaacgtgccccaaccgaattccactatactggaatccgtttctcctcccatggaagaccatgacggcacgaatcacggaacagcttcagctagtgcaacttcagccgtggcggccaagaagccgcaggcaccacggcaagctcccgaacctcataccggtccgcttcccgacacttaccgggcattgacggacaatgatatgcgtcggttcggtgtgccggatatgtacgtgccggtcatgtgcacgagaaagacctggcaggaattcgaccggtgggggtcaatgctcccgaaggatgttttcacgtacctcacccttgttgccgaagggctttccaaatctgaggtcttcggcttgttcgatgagaccgaaggcaagatcagcgacaggctgggattggaacagcagctgcccacttcgtccatcgactctggtgaagaggccgatccggaggatttccgtgccgccttgtcaagctacgcctcgcagcagtctttcgtggtcgtgcagggagaggcggatctcaagcgtattctggacgcaccattggagcagtggcgcgtgttcctgcatccgtcgcaacggctttatgtggaacacgactaccatggtccgttccgtctgctcggtggcgccggcacagggaagaccgtggtggccatgcatcgcgcgaagcgtctcgccgcgagattgctgagaaacggcagtcatcagaaagtgctgttcaccacatactcgcgtaatcttgccaccgatattgcttcgaacctgaaactcatctgcacggcggacgaattcaatgccatcgacgtggtcaatctcgacaaactcgtgaaagacctactgacgagccatggttattccggcgaaatctggtatgacggcagtttcgatcacggtaacgatcttgacgacgcgtggcgtaaggctatcgcatccatcggtgtgaacgatccgaaactcacggtttccttcttcaaaagcgagctcagccaggtaattgtgccgcaacaggtgcggaatgctgccgattacatgcgcgtgctgcgcaaggggcgtggcacgagattgaatcgagcccagaaacttgccgtatggcaggttgtggaaacatatcggcgcatcatgcagtcgaacgacgcgtacgatgtggacacggccgtgcagaatgccgtgtctctgctcacgcagggcgatgcgccgaggaaatacgcgcatgtggtggttgatgagggacaggacttctccgcgccggcatatcgtgtgattcgcgctctggtggacgagggtgataacgacatcttcattgtcggcgatgcacagcagcgcatctacgggcataccgcggtgctatcgaaatgcggcatccgtatccaggggcgtgcccgcaaattacggatcaactatcgcaccaccgaacagattcgtagcgccgccgactccattttccgtagttccggtgcagatgtcgcggactcggtgtttgcggctgttcgtggcattggggatgcgtcaccggccacaacgttcgatgacctggacggaggggagagctcgactggcgatagccggtcactgatgaacggtcctgttccggaaacgcgacggtttgcttcccagtcagatgagatggatgccgttagggaatggatttatggattgtgcggcacggcggaagacgcggccagcgatgagtccgacggcgggcgtgtggattcgcgtaatgtgtgtgtggtggcaagaagtcgctactgcatcgaccagtggtataagacgcttgatgacggcttgccgtatggcgtgtaccggcttggtagggatgcagagaacaggcagaggcaaggaatccgcgtcgccaccatgcatcgagtcaaaggtctggaattcgactatgtggtgatagtcgacgtgaacgatggggtatgcccgccgaagcccgcattgcaggccgctggctccgattcagtcgcattgaatgagatttacaaggaagaacgaagcctcatctatgtggctatgacgcgtgccaaaaaaagtgtgctgctgactggtgtctcggcacaggttggatgaaaggaataacgaaatggctagtaatgtctctatgttttatacgaaaaaaagagcttgcccttaaggaatcggcagagcgtaagaaggggaaaagggtcttttatctggaatcggatgggtggaatgattatggatatgagacgttatttgagctttattggacagatgaagataacaaatttcatgagattggtccagtaaaaatcgctcataaatctgaaaaaattacaagagatttgcttgaaaatagttttagtcgcctagaggaaaatttttgttccttaggtattgacgataaatattatataaatataaataaaaataagttgcatgatgtacttatatctttgaatgatctaattttaagtaagaaaatagattatgtaagttcttctggattttatcaagtttcgttaatgagaaaatatgagtctgataaagaaggagcagagaaatatatttccacagtgcgagatattgtcgacaaaggacttgctgaggtggggctattccatctagagtatgtgttcaatagtgaagctgaaaatagagaagaaaatgagtatctaatacggagaattgtttttgaagcagattcaaaagtttttcctcctgaaaacattcatgtgttaattggagaaaatggtgttgggaaaacgactttccttaaaggaattgcggaaaagtattctggaatcaatgaagacgtgaatcatatcatttatatctcgactaataggttagatgccgatgtgaatcaggcgggatccatggatatcttttcttctgacgctttaaaaaaacttttagtcgacatttctaggtctaatagactttcagaaaaactaatgaatagtttgagaagaattgcgcagaatgtaaaattctatgggttggatttcatttcgaaaattgatttttatcttgaggaaaataattctaacgaatttcgtaaatggattgcagatgaatctaatgtagatcaatgcagtgctggtcaaaaagaagtcctatttgtatttgcttttatgatttataaattcaatacgtctagatcgttgctcattattgatgaaccggaaaattatttgcacgctccgcttttaagtgcttatataaacgagattcgctctttcttaagcaatgaaagaacgggtgcaatggcaatttttgcaactcattctcctgtcgttttacgtgagattccacgaaaatgcgtgtacgtacttcgatcaagagatggacttcgctacgtctctcatcctaatattgaaacatttggagaaaatcttggcgtattgcttaatgaagtattcggtgtgaatgcagacaaaagtggctacttcagttttttgaaagacacagttaagaaaattccaaaagaaaaggtcgagaaaaaatataataagcctttttctaaggagagtctttcaagctattgcatggatgaatttggagaaaagcttggtatggaagcgagagcattgcttccatacatcgtaggtgaagcatggccgaaagggcagcaatgaaaaacattaaggatatgtttagcaatattttccctgatgtaccttgccgaaagcgtaaggataaagaaagtatttctcagtatttaaaagacgtctattctattttatttactatattaaagaataagaagacaacggaaaatgtaaaagattatgaaaagaaacttattgcaattcgtagtgccttcaaagagaatgctcgattgcttgatttaggatgggaagattatgttgaggaggcaagagctacagaagataaaaataattgggagttcctctatgacagaaaacaacttttgaaatattataaatttgatccagaaagactgctttgtccttattgtggaattgagccttctagaacatttgatcatttcttacctaaaacgatatatgcatcgttgagtactactccgttcaatttgattccatgttgtcctacatgcaattcaaaaaaaggatcatttaatcctacaaagaacgctttctttaatccctatcttgatgaaagttattctaattggctggctattgaggactttaaattatgtgagcatactttattgattacatataaaattaacgaatttgataattacaaacaaggggagaagtttaaaaatacagctgatacgttggatcttctttctcgttacagcttaagggctgttcaatttattctaaataagaaggactatataaaaagaagatgtacagatgaaagagaggtcagagaactctttgaagattatttgggttttctttcatcggaagaaaatgacaattggaaaagagtactgtgtgaatatattcagaaagaatcttctaagaaagcgcgagagatgttgctgaaatattgcaacgtctcaaatagatgggcatcttttaaagatggtgtgcgtattccagaatatagacaatctttagataattatttggaaaacaccattagtaatggcgaggagaggaatatttattttatctctgatgaaaaatttgatcaaaaaattgtatgcataaccaataaaatcagtcgagtcttactcaaagatgagagtaatttaagtgtttttgtgccggagataatcaatctttcagattgcatggatgcagatttctatattttcgattcgcagggttgtacgggaattcgttataaatgtattggttgtgaacatggtgtgattgtcttgaagaaagacgcacaaagaacatctgaggtaggctgattgaaagtaacagaattattatctgcacaataattgaactgctattcaaaggcgataggaagtgaaatcaccatggacgctggcaaaaaaatcctgttggacttattgaccggttcgcttcggttcgtcgtgccggtgtatcagcgcagatactcatggggcgaggcgcagtgccgtcaattgtgggccgacatcatagccgccggcagacgcccggatcgaacgcatttcaccgggtcggtcgtatggatgcaggagggcggcatcagcccggacggcgtcagccgttgtctgctcatcgacggtcagcagcggctcacctcggtgaccctgctgctcatcgccttggcagaatacgcccacgaacacccggagaacctgcgcttctccacagacatgatcatcgaccgcggttatcttgtcgacaagtatgcgactggcgaaggccgctgcaagctgacgctttccggcgacgaccgggacgtgctgcgcggcatgtgcgaccatgtgcttgcccttgaccggccgaatcatgggaaccaggccggaacaacgtcccggctggaagcgaacctcgatctgttccgttccctggtcgccgcaatcgatgacgtgaacacggtgtggaacggactgcaacgccttgaagtcgtgtccgtcaccctggaccagggacgcgacgaaccgcaactggtattcgagtcgatgaattccaccgggcttgatctggagacttccgacctggtacgcaactacatgctcatgggatgccccatagccgagcagaacgccctgtacgccgactactggctgcccatggagcgtgtgctcggcagtctctcattcgacgcgttcctgcatgactggatggtcgtcacgttgaagaggcccgtgtccaagaaccgatacatgtactcggaattcaaacgtttcgcagccgatagctccatgccgcgcatggaacgcacacacaatcttctcgagaacatgctggaatatgccgggtattatgccgccatcaaaggcatcgcgtctgccggcagcggcgacgcgaacgtggaccgccgtctcgcctcgatccaaaccctggacagcactgttacggatccgatgctcctgtacatgttcgcggcatggaagcatgaacgcataacccgggacgggctgctgcgcatgctcgcggatctcgaatcgtatctgttccgccgaatggtctgctcggtatccagcaacggactgaacaagctcgtcccgtcgttgatcgccaagctcgaatcagcggaagacgatccggcagaaaccttcgccgcgctgctcctcaccgaaaccgccaaagccacgcgcatgcccacggataaggaattcaggcaggcactgctcggcgagaatctgtaccgcccggcctcgcgctgcaaatatctgctcgccggattggaaaaccacaaccaccccaaggacccgcggtccttcgacgaatacaccgtcgaacacatcatgccacagaacgccatggcgcatgccgaatggcgtgatatgctctccgaccccggccgattcccgctgctggtgaacagtctgggcaatctgacattgaccgcatacaactcggaactttccgacggaacattcgaacataagaagaaccgtgcgatcggcgggtataatagcgaatacctgtccatttccgctgaactgcacgacgccacgcaatgggatgaacaggcgatcgcgcggcgcggcgcgcgacttgccgatcttgcattgcaggtgtggacaagccccacagcgggggaacaggctatgcagactctgcgcagcaggaacttgagccaaggagagcgcgaacagaatgccgtcgatttcgccgacttatgcaagagagggatccttacagccggtgacatgttggaaagtcggtatgccggcgtaatcgccacggcaaccgtaaccgaagaccgtcgcattcgcctgtccaacggcgagatattcgatagcccatccggcgcgtttcgccgtgccagaatgctcgaaaccggcgaggacaagcaggtcaacaacggttggacagtgtggaaagtcgcggacggcggaaccttggacgaactgcggcaagtcagcaacaatatctcactgcggcgcagcttctggaatggcctgtataaatatgctgcaacgcggcccgactttgttgctgtatacggcgacccatccggtcgcaagacgaacagcgacacatggatcagcttcggcgtgggctcggggttctgccacccggatggagcgttgaatattcgagacggctacattacggtcgacctgtatttcatcgacacgttccagtacacgaaactttacggcatgaaggattccgttgaacggatgctgtctgctttgggcgaggcgacttgggacgagccggaagccgacaagaagaaccgccaccttttggtgcggcatgatgtggatttctccgacggtatgacggaagcctaccaatggatgacggacgggctgctcgtcatgcgcagcgtatacgatttgcttgtctgattgctcgatctgctacgtgttcagcactgtatagaatgagcataaccgttcgagaagaggccgccatgaaatacggaatgaggaaacccagctggaagaagagcctgtccgcgcgcacgaaggggcgtgccacctgtgcggtcaagcgtgcgctgattcccggttacggcaagaagggcatgggctggctgcaccccaagcgcaagctgtacaacaccatctacaagaagaccacgttcagtctgttcgacctgttcaagtaaccggggctaaagggggaaatcacatgtgttccaatccagacacgtacgagttctgactttcattagaccttcctcaacagagcgccgttcctactgatacgttttctgccttgcgggaaatccatgaatattcagcggagaacggcccgcgtttccatacggctgctgagatgtttgattctctgggaatatgacagatcccgccatgcgaacattgcgcatggcgggatctgtcttttccgttattgcttagctggcagcgctcagacgagcatggcctcgatgttgttgccttccggatcgtgcacgaaggcggcgtagtaggtcgggccgtagttcagacgcgggccgggctgtccaccgacttcgttcgtatcctcgttatcctcggcactttcgtcgtattcttcgctgaacgagtatcccagattgcgcgtcatcgcattctcgatcacgtcataggcccacatgcgtttgtcatcatatcgagcgaaagcgagtgtgctggaaatcaacagcatgctgttcagtggttcccattgccgcatgtccttgtcgttctcggcctgtgcaatggcgtccaacggcacgtagcgtttgagcagaccgtagacggagaaactggcggcgagcacgattgccatccacggggacgtcggtgactgcgcagtgaacatgcccacgcccagcgccacgttgagcagaggcgtagtcaggtacgcgattgaggtctgcagcgcctggccgttgaccaccagatatatgtacagcaaccaattcacgctgatagccgtggtggcggcaagttccagcgcgaacagccttttgctccgctgtgcgcgtcaaagcgcggcgatcgcgcgatgatatgcgcgatagcggcgggacgccatcagcagcgcaatcatgaccaccagcgtggcgatcagccgatacgccagcacgctgatggcattcatgccggacagcgcgtgccagtagagcggcagcacgccccagccgatattggaaacgagcggcgcggcaatccccatccgcggttgctcgacagcacgaaccgaagtcatacccgccaccatagtgcctgatgtgtcactgccgtgcgtgtgctcacacggcatttgttagaagcttttccgggaatcgaatacaagttatccccgacccaatacggtccgattatctcagcaccgctcccgaatgaaatcgaagatcatatcgaacacctgcgggctccagaagtcgtgctcgtgttctgcgccgtcgaccagcaccagccgcgagtccacgccgtgttcgagaagcctcttgtgcatcttgaccgactgccggtaggggaccacggtgtcggcggtgccgtgcagcagcatcgtcggcggataggccaccccgtcacgcacctgcaggtacgggctcatgtcggccgcccggcggcgcacgtcgtcgctcaatccggtttcatgggtcgccccgaccactgcggcgaacgggccgaaatagtacagccggaacgggtcatcttcgttgccgaacgcgtcgatcgcctccatcatgtcggtgggcgggaagcagctgaccacgaagctcaccgcgtcgctttcggtggcataactgccgtcttcataccgcgggtcgtcggcagtgagccccaccagcagagacgtgttgccgccggacgacgtgccccagatgcccagccgctcagggtcgacgtgccagcgccgcgcgttcgcccgcaggtaccggatcgccgccttgacatccttcagataggcagggaacacggcactggcgtcacgcgaggcgttgcgatggttcaccgtcgccaccacgaatccctctcgcgccagttcggatagctgcgggatctcgtaatcacggtccggtgtggtccacgcgctgccctgcacgaacaccacggtggggtagcggcggtcatcatcgtcgccggtggattgcggcgcgatgatgtccatcaccagatcatcggccccggtgcgatacgccacgttgcgggtgagccgggccaggccggtgagcgtgggattattcggtacgtggacggtttcgacggttcggtcttctgacagcgtgatattcggcatgaggcaatgttacagcgaatggttctcaataagaaaggtgcgagtccgttatgtgaggaaacgaacacggattacttcataagcccggtattttgccggtctctgaaatgttcgattgtgcggaaatgttcggaatcctcgcacttttcttattgagaacgattcgctgctacatccggaacgcagcgcgcgggtacgctaaactgtgtacagctcagaaattcaccccaaggagatgccatgaacccgagacgcgggccgatcgtcgcaggcgagaagatccaattcaccgaccgcaagggcaagaagatcaccgaccagctgaccgccggtggcgtcacccagaccgagcacgggatcattctgcacgacgacgtgataggccgcaccgagggcgtggtcgtcaccaccgtcaccgccaagcgcgaggctcaggtcaatgcggaccatcccgaacgcgaccggaacaagccgtggaaggcgacccgtgcgatcggcggctggcagtatgcggtcatgcgcccccgtctcgccgactacgtgctctccatgccgcgcggcgcccagatcatgtacccgaaggacatcgcgcaggtcatccagctcggcgacatccgaagcggcctcaacgtgctcgaatctggtgccggatcgggcgcgatgagcgtcaacctgctggatgcggtgggggagtccggccgcctgaccaccatcgagctgcgacccgaattcgcccgtgtggccgacgcgaacgccacgctgtattacggcgaacgcccgcagtggtgggacctcaagaccggcgacttcgactcggtcgcggccggcctgccggagcactccttcgaccgcatcgtgctcgacatgctcgacccgtggaacaggctcgaacaggcgtaccgggtcatcgcgcccggcggcgtcctcatcgcctacatcaccaccaccacgcaaatgagccgactcgtcgaggctctgcgcgaagccggccattggaccgatcccgccatccaggagacgctggaacgcacgtggaaggcgcaggggctcgccgtgcggccggaccatgcgatgatcggccacaccggcttccttgtggtctcccgcgcgatggcggaggggttcgcggccctgcgcaaacgcgaccgcgccaccaaggatacgaccactgacatcgattcgctcacccccgaacagcgcgaggcccagctggacgatctggagctgcgcgacatttcggaccacaagctgcgcaaggtgctgcgcgacctcgacctgcagacgtcccgactgtcgcaggacgaccaggcctgcgagcaaggcgaggcgacggcgatctgacagcccaatcaggcgcggcgaatcttaacggcaggcaatgatttggtgatgacgggaagtcgagcgcccctcgtctgccacaatggaggcagtgacgtcgtacggaaaggtcctgaagaatgggcgtgaatctcagcaaggtcgagaaaaaggcgaagaactattcccacgtgctgctggtcatgcggcacgcgaaggcggaaccgttcaacgacaagggcgaccatgaccgcgagataaccgacaagggcgagaagcaggcgaagatcgtcgccaaggggctcgtcggcatgaaactgctgcccgaccgcgtcgcgtgctctggcgcggtccgcgcccggcagacgctggagagaatgctcaaggtgttcggcgaccatcccaaggtcgaataccgccaggccctgtacgacggcggcatgcaggccgtgttcgacgagctcgccaacgccaaggacaagacccgggtcctgatggtcctcggccatgagccgaccgtttcggtgagctgccagtggctcgcctcctcggattcggacatggtcaagctggatctgctcaacctgggcatgtccaccgcctccgtggtggtgttcggctccgatcagccgttcagccgctggcaggtacacgacgccgagctgctcgccgtgctcagtcccaaggatttcgactagggatgacgcctttttgccggccggtctctctcgcgaacggtgacagccggcttgtgttataaccaccgttgatacgcgccaccttgcgcaggagtggcgctgaaccgttggaatactgcggaaacgtagacggcagtaaggcttgtatggcgtcgtgcgcgcgtgacgctgatactagttttccggctggaaacgtcgttttacgcccacttagagtgtgatttagagtggactccctgacacgggaggacagtcatggcgggcaagacgaaaaacagaaggaccggaggatccggaagcgtgttccaggactccaaaggacgatggcacttccgcaaggacatgggaaccgacccgacgaccggacgcagacgcccgccgatcgaagccaccggcatggttaaaagcgaggcacgcgcccgcttccaggcgaagatcaccgaatgggaacgggacggaagactccccagcaaggacggccccaagaccgctgactacttcgaacggtggatggaggagcaccgcgcggccatcaatcccaccacctggcgcaacgaatccagctggatgcgcaccatgaacgcgatcatcggcgacatacgcctcaaccggctcaccgccaacgacatcaacggaatgtgcaggagactgcgccgcacacgcaaaagcaagaccgtcaacacctatctcgcagtcctcggcgccatgctccgaaccgcgaaacgggacggactcatcgccgacgacccgatggaaaacgtcggacgaatgccggaggaccggtacgaacgccccatcctcgacgtcgccgacccagcgaaggtcatcgaggccgcgctcgccgagcccgatccggcggtcgccgtgttcgacagcccggacgagcgtgagaagtgggcactcatgttcgaactcgccttcaccacgggcatgcggccgggggagaggtatggcctgatgccctaccagctggaactgcatcatgggattcccgtcatcaacgtgtgccagcaggccaagccgataccagccggcgccacgatcccggattggatggaagccgagcatctggatggggcgatctggctgaccaaaccgaagaccgccaaaggcgtgcggacggttcccattccgcaggggctttgggaccggctttgggcgcatatcgtcaaatggggcgtgccatcgcatggactggtgttcaccaatctttacggccatcccatcaggcgggacaacgaggagaagcgttggcgccgcgccctgaagatggcgggactgccgtacgtcgacatctacagcgcgcggcactggctcgccaccgaactcgccgccgccggcgcgagcgacgaggagcgcaccgccatcatgggccacaccgacatccacaccaccagcgtgtacacgcattggagggaacggcggctcgccgaaacgctcgacgccgccctgccagacctccgcgacggccagtgacggacggcgacggcttttccgcaacacgaaagagtattgacacaccccgcgctcatcggtagattgaagactgaagcgaggaggtgccgatgtcgaagattaccatcgataatctgtccacgccggctgcagcggcgacggagacgctactgaagacagtcgcgcctaacggttacctcaaccttcccgtggatccgtcacgcgtggcagagctactgggcatccagccgcagaagctcatgctggatccaaacgttgacggcctgctcgtcaaagacaagtccggcgagccgttcaaggcggtctccgatgcgtatgcttcgccgcagcgtcagcggttcaccacagcccatgagataggtcactgggtccataaataccagaacacgccggacgatgccgtgctcggaagggtggagagccgcgacgacacttcgtccaagggaatcgatcccgaggagatctgggcgaatcgttttgccgccgcgctcctgatgcctgccgcgatagtcagacgccattggggtgaagggcgcacccgcgacgagctggccgagatgttcggtgtctcccgacgatccatggacgtgagaatagccaccctggggttgcaatgagccaaaccgaacaggcatccagcgaaaccgatgaggcgctggccatgttcaacagggcgtccgccgccacctcgcatgtgccggtcgcgcacggttccgcacccgacggcggggaaggagtcgatggttccgcagatgaggccacaggtacagcctcatcattcaacgcccgacggagagggaacgccgctctccgcaaactcgatgcgaaaaacacgagacgcgaacaagagaaccagctgcgcaaggaagtggcgacctggtcactatggttcgtgctgacacagctcgtgataacgaatacgaccatcgtcgcgtacattgtcaccatgcttgtgctgaaacagtacgtgccgaccgaagtgctgattacatggctgtcatcgacgatcgtggagatcatcggcatcctctgggtcatcgcacgcagcctcttcccgttccacgacagacaccgcgacactaaaggcgaaaaacacaagtcgtaaacacttcaggccaaataaaccaaaccccggcgctcgcggccatgcggacgccggggcctttttctattgcacgcacacgccggaatcgtacaatagctgccggtagtcctccaacacctggatggtgactcccaattccacggccatcatccacgtattgccctcgtacaccgtctcggccatgccgtaatccaccggactgatcaacgccaacgccgtctccctacggcaacggcgctcgcatctgactccgtattggctgccgcatccggggtcgtggtgtctggcatggatgagctcgtggcacaatgtgcagcggcgctggcgctggttgagcctgtcgtggaggaatatcgtgcggctcgcctcatgccatgcgccgcacagcccattcggcagcggctgctcgatgacgcggatatgctccctccctgcacggtcgaggaaggaatccaggctgcatccgccggtgatatgaaacgacccagcctggttcgccgcgccgaaggcgctcgcgtgctgggtactgccgatgctcagactacccgtttgccgtgaccccttttgcatggcgtaggctgttgtgcgcagggccgtcctatgtggatgacggctgggttcccgaatgggagtaagacttcgggtcgagaattcctttgcccctggggccggacttgcctcctcgccggctgtctcatctgccgattccgtcgtggcggcctccgtcgatgcccttggcgaattcctcgaagtcgtatggttgcgccgcgttgaacttcgcatattcctcggcggccttcctgtccgcctgcttgcgggtcacggtgcctttgccggtgagcgtcgcgcctcccgaaagctggatgtattggcttacgagttggatgaattccggcatggtggtggtcagtcgcgccgcgaccctgttctcgatcatgtcgaggaagccgctggtgagacggttgagccgcgtcagctcgttctcgtccaggtagttcttggcgacggtcacatcggatttgtggattcgcccgttgggggagccatgccatgtggtcagtcccatgtgcggtttcgtggcgtcgacgcgttgggtgatgatctccggcgcggtgtgcccgtgggcggcgtagtggaacctgttctgcatgttctggtagaactcgcgcgcgatgccgctgtccttgtcgtagtcggtgcagatctcctggaatatggcgagcacctgctggtagaggcgtttctcgctggtgcggatctcccgtactcgggcgaggagctccttgaagtagtcctcgccgaacgtgttgccgttcttgagcatgtcgtcgttgagagcgaagcccttgatcatgtattcgtgcagcacgctggtcgcccattggcggaaggccgtggcctgcgggctgctgaccctgtatccgacggcgatgatcgcgtccaggctgtagaagcggatggtgcggcgaaccgttctgccgccttcgtttcgaactatttccatttccgacatagttgccgattcggccaactcgccttcagcgtagatgttcgccagatgtttggataccgcgggcacgttcacgccgaatagtcgcgcgatgttcttctgcggcatccagaacgtccgccgccagtacgtgacctcgaccggcacgttcaccccattggcgcggtagaggatcacctgccctctgttatcagggtcgaattcctcgctcatgactttgattcctttcctttcggttcacccaactctatagaccgtcactcgtccggggtctcggactccatgtcacggttcctgtcagtgctggcagcaagctcctgaggtggcaggtcctcgaatctcggttcgaccagatcatccgtgacctgattttggcgctcgcgggcttcgtaggcgcgggcggcctcgctgccgagtgctcgtgtgtagatgtcgaggctggtgagcccgaatgtggaggcgatgtgctccacgtcggacgtcgtgagcggcgcttcatatcggagccttacgtgccagtagttgtttctcataccgctctttttgtagaactcggcatttgttattccgcttcgtttaacgagatctcgacatatgtcgatgattctcttgctgtcttcggtgacttcatttttggcaatgcttcccatgcccaacatggtacccaattgagaaggatttgtaaagaatacttaattgagtaacaataaacttactcaattaagtacggtaagaattaccgcaaggcatcgcaatgaacaaagaaaggagcggcaagacagatgagtgagacggaaaccatcgcaaggaatctcagcggcgagctcgcacggcatcgcaagacacaggccgcactcgccaaggaactcggcatgagcgagaaaaccgtcagcgaacgtctgggaggcaaggggtcgtttaacaccgagcaactcgagaagacggcgacgatgctcggcatgagcctctaccagctcatgatcaagctcctccaaccgatcgacggaatcaaccaaatcaaaccataagcagtcggcgctcgccgacgcatgaatcgaaaggaatatccaaatgaaaagggaaccgatgaggactgccgaaatcaatatcatcgcattgacggaagggcagtttcgcgcgctctgtgagctaatcggagaggattctcaggagatggcgcgtcttgatgagaacccgatacgtgtgtggtattcgcggggaaacgattccactgtggtcaggtatacgaagatgcggcagattgatggcaatcagctcggccatatcctcggcatcacgaccggtggtacggagggaccggtttcatcacgaagaaacgatgggatagatcgtcgggaagagcccaggtgatgcgtacgtcatcgttggtgctgacttccagacctcgttcgaggaacaggaagcttgcttcggagccgcgcgagatgtcgccgagctcgtattccttgccattcgaaagctcgaccctcacatccttggcgtcgaacggattgttgttcgcgacggaatgtctgaggttctgcacctggcgaagctcccattccggaacggacgcctcatcttcctggatggtcgcttggcgttgcagggcgtcagcctgcgactcaagggcacgcacctgatcgcgaagcgttgaaaccgtggcgttcgacgcttcgagctgttctcgcaacagtttgatgtcttcctcacggtccttgttccgttctttcgaactcttgtgttctacgacccagccaacgaccgttacgaccagcgtgagagcgagtgcggcgaattcgatgccgtgctgtgaaaaccaatcagtcatgaaaacgattctaaggagaatcacatgaacaatgaaatgcagaagttcgatttcaagggtgcatcattgcgcaccttgaccgatgaggcgggggagccttggttcgtcgccaaggacgtatgcgacatcctcgaactcaccaatccggcggttgcattgcagtccctcgacgatgatgaaaaaacaaacctaagtaattcttatgtttggtcagagcctggaagaaggcctctcatcattagtgagcctggcctataccgtctggtcatgcgctcccgcaaacccgaggccaaggagttccagcgttgggtgactcacgaggtgctgccccagatccgcaggaccggcggccaaaagacttcatgcaatctaattggcgagagattcgggaggcttacggtcatatcaaaaaacggaaaaaccaagtggggaaatgtcacatggaaatgtgcctgcgattgcggaaaaactgtcatcattccggtaggacacctcaaaagcgggcatacgaagtcttgtggttgcctcgcatacgacatgcatgtagaacaacttgaaacacatggttataccacaggtggcaagcctcgcacgttcaccatttggcgcggcatgaaggctcgttgtctcaatccgaagtcaatcagttacaagaattacggtgcacgcggaatctccatatgtcatgaatggcgttcgttcaaagcttttcatgaatgggctatcgcaaacggatactcagatggattacagcttgaccgaatcgacaacgatgggaactattgcccgaacaattgccgatgggtcacaagaacagagaacgcgagaaacacgagagccacgcatctcataacgctcaacggcaagactcagtgtgctgctgcttggattgaggaacttggaatcagtaaatcaacattctatgaggcacttcacaaaggccagacgtacctcatccgccggtattgcctccagccgtcgttggaagctggtgcgtgatgagcgtcagtcaattcgcgtgcctatcgggtcagctgctgtgcgtggtcgtgttgctttgcgcgattctcttgaaacttctgaccgtggtcaaggtgcttcatgacattctctgtgcgattcgttcagcccagacgcagatcgaacttagtccccttgcgagaaatcgtggggaattttggacaagggccaggtctttgttttcccgtggccgatgaacggctgctgccgccaggtgatcgtcaccgaagcgccttcgggaggtgtgtaatgcaggtacttatggccattttcctcggtctccgattccttcaccttgattcgcgcgtacacgcagccgccagtggcgacaagagagttgaagcctttccgccgtgatccataaggggtttcgggactgtgggtggccgttgcatgcacgtcggtggcggctccgttgcccacattgacgatcttgaccagaaggcacggaggatttccgtatccgcattcgaccacatagggctgccacttcggcctacttcgatatgcgaagttccaagccatagctcctccggtaaacaacgcggtcaagccttccaaaccataactgatccaatccatagttcttctcctaactgttcggcccgcacgtcgcaaatgcgggatgacaccgattttaggagagggccgggcggttctcctaacgccgcccggcatcacacacgcaaaggaggcgcgtgatggtcccgcaatacgagctcaaggacgcgagccgcatcccgttgaaggacaggcttgcatggacgatcccgcaggccgcgagcctgtacgggatcgactacgacggtctgcgacaggctgtcaaccagggcgacatagacacgtttcgtccgccaagcaaacgaggaacgccttcccgccgtcacatcaggcgcgaggaaatggaccgatacgtcaaatcgttggaggagtaagcatgaacgacattcgcaaggagctgtgatggcactcaggagaatcgacgcggaaacgctgctgacaccacccgcaccgccgagggacacggtgatcatgttcggcttgaccggctacgcgattcgcgtcacgggcaagggcgccagcctcatggagctcgacgtcgacggaagccacgaactggcgagcatcggaaaagaccaggcaaggacattcattcaaagcataggaggcgcaagatgaccgacaacgactatcgcatcgaggacgggtccgaaaaggggaggccgaactacacgctgcgtcgtgtgaagttcacggccgccgtggtcggcctggtcgtgagcgtgacgctcatgctcacctggcatggcggcggcctgacgggcgcgcttgtggtggagggcgtgtatctggccacggccctgtggctgacggtcaggttcgctccgcgcgatgacgtggatggcgacgtctgaccgtatccgccggcgtacaaggacgcggacggatggcggaggcgtgtgtcctttcatctcacattgcatttcactctcacgtcttccgccgtccgctgcgggttcgaatcccgccgccggcgcttggccggaccgtcaacgccgcccgcatccccgtttcgttcagctttcctggggtgtgggaacgatgggcgcgattatttgctgtcatggcgcccagcggtccggctcatatcaatcaatctcgtatcaatcaatcaaggtcaagggaggaaccgatgaaggagattctgccgcattggcatttcagtccgaactctccggtcaaggacgtcggcatggagaggatgacgcgtggcgaccgggcggtggcggaggcgtgccgtcgtgcgatggagagcgagacgtggaaggagctggtgatcttggaatcgttgggcgtgcgcttcaccgaactggtgggccggttcgtgtccgaggtcgcgtctcccgtgttggaggcgatgcctggcgacgctttccatcagggagtggccgcgcagttgacgcacatggtgaagaccagggatggtggcgagaccatccgcatcatcaagactctcgccgtgaaaggtaggttctgatggctggtgagacgatcatcgcggtggtgggcaatctgaccgcggatcctgagttgaggtcgacgaagaacggcaggagcgtggctggtttcacgatcgcgtccactccgcgcacgttcgaccggcagtcgcagcagtgggtcgacggggacgcgttgttccttcgctgcacggtgtggggtgatctggccgagcattgcgccaatagtctcgcgaagggcatgcgtgtggtcgcccagggcaggctgacgcagcattcgtgggaggacgagcagcatcagcagcgttcctccgtggaattgcaggtggatgagatcggcccttccctgcggtatgcgacggcgcaggtggccaaggcgcagcggggtacggctggagcgtatgggaatccgtactccgctccggccggctatacgggcggggcggccgctgcggattcgttgccgacgtccgacccgtggggcaccgaccaggccacgtcttcctcgtcgttcggctcgttcggacagcctgccgaaccggaattttagaaaaccaaaggatgaatcatgggcatcacgatagagaatctgcaggtcgacgacctgcacgccaatccaaacaatccgcgcaagcaggtcggcgacatcgacgaactggcgtcgagcatccgaagccagggcatcaaacagcctttattggtcacgccgaacggcgagacggacatcgacggacacaaacagtaccgcgtcgtcatcggccatcgcaggctcgccgcggccaaacagtcgggactctcgaccgtgcccgcgatcgtcgaggagatggatgcacgccgcgaacgcgagatcatgctcgtggagaacacgcaacgctccgacctgactccgatagaggaggccgacggctaccaagggcttctcgacctgggcgtgggcgtcaaggagatggccgagaagacgggacgcagcgaccgtttcgtccgcagacggttgaagatagccagaatcccgcaggagacgcgcgacatgtccgccgatttcagccaactgtcgctcgaccagttggacaagctcgccgaattcgaatccgaccccgacatgcagcaggaactcgcccgcgccgacgacttcgactggacctaccagcggctctcccaggaacgcaggaagaccatatggcacgacaaggcgctgaaggcgctcgccaaagccggaatcaaagtcgaaagtctccccgacggaaagaacttctggaactggcatccgcacggctacaaggccgcccactcgttctccgacatcaacacggacttctggacctcgttcaccagggaatccgactggccggaagccagagtgtactcgtatgaatactggttctgcacatacacgcccatatcggccgacgagctcgaaaaagacaaggccaagaccgacaaggacaatgccatcaaggcgcgaggcagggaactcaaccgacaggcccgcgaattcgaagcgatcgccaaagccaaccgcaccgcatggctgaaaggcaacctccatacgctcactcacgaacacgcggaaacgggactctgcaggctcgcgctcgcggacactgtcggctggaggagcgtgttcccgtaccagtcatacaagggcgaggacgtcatcagggagctgatcgcgttcggctggagcctgccgatcaccgagcatgacgacgagcactggtcgctggaatgcaaggagaacctcgactcgatccgcatggtgctgaaggacaggccgctgcgcatcctcgatgtcctggccgcccgatgggagtcgaacatcggctggaactactggcgctcgcggcatggcgtggacgatatgtgttgctggtacgacgtgctggaacgtatcggatatcgggtcagcgaggacgagaggaaggcgctcaagggcgcgtacctcgatggaggagatgacgaatcatgagcatgaaggcattggagtgggccatgtacaacgtgcccgccgaaatggtcaaaggagctttgctgcgcatcctgctcctgcttgccgaccacgctgacacgcagggcaagggagctttcccgagccagaagcgcatcgtggccttgacaggatacagccgtcgcaccatccagaacggcctgcacgatctggagacggccggactgattcgcaggggagaccagcggatcaccgagcatctcgggaaataccgtccgatcgtctgggacctcacgatgaaggatttcaggggcgcaaaaactacgcctctggaacagcagccgcaagaggcgcagaccactgcgcccctaaacaagttggaggggcgcaatcaggggcgcaaaaaaacgtctctaggggcgcaatcaggggcgcaacatgactgcgcacagaacctatataaggaagaaccatatatagaacctagagagagtaacgcgcgcgcgagaaaaccaatcccaataccagccgactggaaaccctctgaagaacaccgggcgctcgccgaccggctcggcatcgactgcgacatcgaagccgacaaattccgcgaccgcgcactcgactcgggagcccgctcggccgactggaacgcgaaataccgcaactggctcgtcaaaggcaaggaacgcggattcgccacaccaaaagattccaacgctcgccgacggtatacgtggggcagcgaagaggtcaaacgcgtgctcggcccgatagcctgcgaaggcacggacacgtacatggagctcgcatgcaaggtcgccgacctgctcaaccagggcttggacccggacatgctgcgccgtcagctcgcaaacgtgcccgacaacgtattggccgaacaattgttcgaacaggaggcggcggcatgaacgacatgaccatcgcacacatggccgccatcctcacctcggccatccaggccgccgaccgattggaactcgacgcgctcaaaagcccggcgctcgccgatatgggccttgaccgcatccgcgatatcaaactcgactgctcgacctgcatcaacctgctcgaccagcttggaagggagcgacgatgagcgaccggcaattccaggaatcgaaacgcatcgccttgcaacgtcagggctggcattgcctgcgctgcgggacgaacatccacgacccgtcactatggcctggacgcagtggccatcaccggcagttgcgccgtcgtgccgatcccgccgtgcgtgacctgccgtgcaacatcgtcgaactgtgcggttccggcacgaccggctgtcatggttgggcgcacgcgcatccggccgaagcggaacggttcggctacatcatcccgagctggcgggatccgctcagcgtgccgatacgcgactggaacggcgactggtggtggctgctgtctgacggcacggcacaacggctcacacaaatcgaaatcatcgaatggcaaagcgattggaaggaacaatcatgaggaaacaagacaaagacctgaacgtgaagccggaggcgctgctctggctcgatttcgaaacgaccggtacggacagggacggcagtctgccgttggaggtcggcatggaatgcaccgacgtgctgggcgaacattcgtatggatccctgcatcgcatcatcagaccggactatctcgacctgttggacatgagcccgatagtgttctccatgcacacggacaacggcctcctgttcgaactgtcgaacggttccgccgggaacgactgcgtgggagcggtcgcgaacgccgtggaggagtatctcgaatccctgtcgcaacgcttcaccttggttccggccggaacgaacgtggacttcgacatcgacttcctgaaacgtctcgacctgaacccggacaggtggctgtcctaccgcaagttcgacctgaccacgctccgccggtatttgaggttcatcgactgccccgaagacccatacaagacgcatgccggcacgcacagggtgcgcgactgcatccgacgcgacatcaacgactacatccgataccgcaaactcctgaagggagcacggcgatgacaacgaagggaaaaaccacgaagaccgtatccaaggagacacgaccgcgcaaatggcgcaaaccagtgccatgcccgacctgcggcagccgaaacatcagattcgacccgtttgcccgggccgtcaaccggaaaacatccgccatacgacagttctgggtatgctcctgcgaacgccacggcatcctcatcctcacccgccacgacgacctcaaggaagccatccgcgcatggaacaaggaagccaccagacaaggaaggaaacactcgaaatgagaaaacgcaaaccactcgcactcgccggcatcggcctgaccgccatcaccatgttcctgctcacaccggtattcctcctcgcgctcgcgggatgcgggagcacgcctcacgagccggaggattcgaccacggaatccgccacccggtcgcagtgcagctcagactccagcaaattccagacgtgcacggtcacgatgccggacacgaggcgcgtcacctgcgtcttctacaacggctataccgaagcgtccatgtcctgcgactgggcgcacgctgacggtgcggacaaggtggaggactgatcatggccgtcacgaaacgcaaggcggagatggtcgtcacgtggcacgagcgcggcgtcgacatcgagacaacatgcaggatgctcggcgtcaccccgcaggaggcgagcgcgatcatccgtcagcacgccgcggagcgggagcgtcgggagcgggcggagcgcatgcgcccgaaattcatcgaaccgcccatgttctaggcgcctttatacgcctttatatgcccgtatacgtctaccgaaggagcgtaaaaatggatcggaactgccagaactgcgataagcgggtcgaggagtcatggacgttgtgcaaggcgtgccggcgcgggtacgcgcggctcctgcaccggctgcgcgtcaacctgtaccggctccagtcggtcgcgcgccgagaataccgtctcacggagcccggcaacggaggcaggccgcagggaggcgacgcgcccgcacccgtcgacctgcacgccgtcgacctgctcgaccagaccgagcaggccatcgaacaggcatgcgcggacgcgggaacatggctcggcaggtggcaatggctcgcaaaacgagcgccagtcatcctgcccctcctgtgcagggcgtcgaacgccggatggcacatgcggcgcctcacccgggcatgcgagcgaatcgagcggatcgtcgaccgcgtgccacgctcgcgtaggatcgtcggcatgtgccccgaatgcggacgcgaagtcctcgccgcgaaaggcgagacgctgaggctctgcaaatgcggcaaccccgtcaacgtgaccgagctgcgggagcaaagccgagccaaggccgaggcaatgcacatcaccaaaaccccggcaggcatgagtcaatggctcagggaaaactacgggtacgaggtcagccgcaagacgataaccgatgctttgcgacgcgggaagctgcccggcagcaagccggtcgaaggcggctattgggagttcagcatccgcgagatagtggctttcgccatgtccaaggcttgacggtaatacgcataatgtgtatgataaggggtgtgaggttcaaggaaatcgagaagatactccgcaaggacggatggcgactctactcgcagagcggaagccactgccagtacacgcaccccgacaagcccggaagggtcaccgtccccaaacacagcggagacctcgcgcccttcaccgtcagatcgatatggaaacaagccggaatcaacgaaagaagaatcaaatgaaactcgtctacccggtcgtcctctacccatccggcgtccccggcgggtacaccgtgctctgccccgacatgcccggcctcgtcaccgaaggccggaacctgcccgaagcgctcgacatggccgtggacgccgccagcggttgggtgctcggcgaactcgaggaaggacgccacgagccgcgcgccaccaacatcgccgacgtgaaacccgacgaaccgggcggcatcgtcaccctcatcagcctcgacatggactcctacgccgaaaaatacggcagaaaatcagtgcgcaagaacgtcactatccccgcatggctcgacacgttcggcgaacaggccggaatcaactacagccaagtcctgcgcgaaggactcgaacgccgatacaacgacctccaaaacgcctgacatgcccaccccgcaattcaccgaatggcacaccgccgaacatctcgaaaacgaagaagacatcagactgtatctggacgcctgcaaggcatacgacgacccgcgtctgatgagcttcgcgcagcgggaagcggccaaagcgcgagaaaacttttccaggcgggagtaggctgccgccatcccgtggtatactccgtatcaggattagtgtgaatgccctaggagatgcgctcttctagggctttcgcatatccagccacaagggttcggggcgctgctgctcaaggcctgcgagcgcttcgcgcggacattcgacgtgggctagtccgcgtgcttgcgtggtctgcctccgccgacgccccgaccgggacgcttcgcgttccatccgtctatcgtctccgggagccagccgcgcgtgcggcctatcatggcgtcgggttcggggagcttgaggttgagcaggccgccactggtgatgccgaggcgttcggcgacctgcttgacgccgaggtattcagtcgccatcgtcgctcctccagcccgcgaacaggccggcaagcccggcggccacggcgaatcccgcagccccgtagggctggcccgacgccgcgaacatggcggatacgacggcgaacagcatgctcatgattcccaatgttctcgatttgctcatgatgtcccatggaatataggattggcggaggggttccggctaataggtctagccggaacccgttttacttcttcctgcgtttccgcttggaccggcccttcttgtcgggcttgtccctgcggacctcgatccagatggtcaccgctatggcgacccagctggtgatgagttgcatccaatccttgagttccatgttcacctcctttccttggtcgatatatctatagtaatataattactatagatatgcaaggcgggagcacaacgacacgccgaccacgacggtggagagaggtggatgccatgccctccgcgagccgacgcgagcgctggtacaccagcgacaggcggtaccggctgccctccgactgggggcggcgcaaggccgccgtccgagcacgcgcacgcggcagatgccaggccgccagccacgcccccggatgcaacggggtgggtacggagtgcgaccacatcgtcgccggcgacgaccacgacctcgacaaccttcaatggctgtcgcacgaatgccacaaagccaagaccgagcgggagaacgccgaacgcaaccgacgacgcaagctcatgagactgcatccgagcgaaagacaacccggactgctagactggacgccacgccgggtgggaggggactccccggcgacaccggtataaccgccggatagcacctccggttgtgcatgcgcctgaaatccccgtttttcctcctgcgtcgttttccgccggtcttgtcccgttcgcccctcccgtggccgtttcctcggctcgctggggccttccacgttcgcgcgacgctttcctcgccgtccgtctttcacctcttcaagccatgtcacgttatgaataaaacgttggaatatggccgttatattgttttttaagcgatgtcacgatatagtggattgtgtgaacgggacatgcgaatactgtggaagcgcgatggatgcggcaggacgcggcaggccgcgccgctactgctccgaccgctgccgcaccgccgccatgcgcgagcggcgggccgggcgcaacgcgataccgtacgagatgacgcacgccgaccggtggctgcgctggaagcgcgtcacacgcggcgacggcaccaccaagcggcccatcaccatcgcgggccgtcccgcgtccagcaccgacccggccacatggtgcgcatggtgggacgcgctcggctccacagcgggcgacggactcggattcgcactcggcggcgggttcgcgtgcatcgacctcgaccactgctacgacaggcgcaaccacctgacggactgggccaaaatgctcctcgcccccgtggaaggcagaacctacatcgagaccagcccctccggcgacgggctgcacatctggggacgctgcgcgccccgcgccggcgtcagggcgcgcgggctcgtcaccgcagaggcgtacagccgcgaccgctacatgaccgtcaccggccgcccatggcaccacgcgccggccacgctcgccgacctcacgttcctgttcgacgtgatcgaaagactccgatagacgggaaggagacaatggcatgcccacgccgaaacccaccaagcaccgcatgcccacgggcctgacccgcgacgggcgcggacaacgcctatggcgcgacctgaccgacagatgggaattcaccgaagccgaataccgcgacctcgaaaacgcctgccacaccgccgaccgcatcgtcaaggaacgccgcgccatcggcgacgactacaccgtcgaaggcagccagggccagatcgtcgcccacccgctcctcgcccagctgcgcgccgacgaaaaccacctctccaacctcctcaaccggctcgacatgcccgaacccgaagaacaggccgccgccgacacacccggaacgagaagcgcccggatgcgcgccgtcgccgactcccgctggagcaaggcgttcggctgatggcacggctgcgcaacgacaacgcggccgcactgatccccgacaggacacgcgaactcgccgagatcgccgactggtaccgccgcgcgctcgccgacgagccggcgcgccgatggaacacgggcccgacgctcatcggccccacgtggaagcgcggggcggacggcggctggctgctgcccgagcacacgctcggatgggatttcctcgcgtggtgcggctactggctgcgcgattccaaggcgcgcaccccatggaaatggacgctcgagcaggcgcgcttctggctgtggttctacgcgctcgacgacgagggccgaccgttgcacgacaacgcggtgctccaacggctcaaggggtggggcaaggacccgatggccgccggcggcgcggtcgccagctgcttcgcgccgctcaccttcgaccactgggatccgcgcaccggcgagccggtggggcgtgaggagccgaacgcgtgggtgcaggtgtgcgccgtcagccaggagcagaccaagaacaccatgaagctgctgccaagcctgatccccatggagaccagacgccactacggcatccagctcggcaagctcaacatgtacgccctgggcgacagccgccagatcgaggccgtcaccagctcgccgctcgccctggagggcggacggcccacgttcctgatccgcaacgagacccagaactggaactcgtcgaacggcggacacgacatggacggcgtgctctccggcaacgcggcgaaaagcgccgacggcgtgaacgcgaagatgctcgacatctgcaacgcctaccgggacggcgaggacagcgtcgcgcagagggtgcgcgaggcgtgggagggcacgcagggcgaccccgacagccccgacaaggggctcaggccgaaatacatggacttcgggctgctctacgattccatcgaagccgccccggacacccccatgaccgaggaatcgatccccaaggtcatcgccgacgtgcgcggcgacagcgactggctgtccacgcgacgcatcctcaaggagatcatcaacccgaagaaccccgtcagcgaatcccggcgcaaatggttcaaccaatgccaggcccccgaggacgcgtacgtgaccagccaggaatgggacgccaacgaacaccccgaactcgaactcggggacggcgagaccatcgccatgttcctcgactgctccctgaccgacgacgccaccgcgctcgtcgcatgccgcatctccgacgggttcaccaagccgctgggcctgtggcaacgcccgcccggcaaacgcggcgacgcatggaaggtgccgcgcgaaggcgtggacgacaccgtacgcgaagccatgcgacgctaccacgtcgtcgccttctggggagaccccagccacgtgctcgacgacgaaaccggactgcactactgggacccgcttttcgacgcatggcaccgcgactacgggcgcaggctcagactctgggcgcgccccgaaggccgggaccggcacgccgtcatgttcgacatggcccgcctcgacgtgcagaaacgcttcgtcgcctacgtcgaccaggcctacaccgccatagccgacaaggacttcccccacgacggcgacgcgcgcctgcgccggcacatgctcaacgcgcgccgccaacccacccgcgccggcatgagcatcgccaaggaaggccgcgaatccaaacgcaagatcgacctcgcgttctgcgccatcgccgcccgcggcatgcgccgcgaatacctcaacgccagaaaacaaggaggcggacagatatggtgaacgcatacgaaaacgaaacccaagcgctcgccgccctgaccggccaagcgctgccggcatggaacgcggaactgccccggctggaccgcatcgaccgctggtggcggtggaaccccaagcccatccggctcaagaaggccacggccgaacaccgcatgctgcgcgacatgggccacacgccatggctgcgcctcgtggtcaccacgctcgcccagaccctctacctggagggcgtggacgtgcccggcgacgacgacaaccacacccgcgcacgcgaattctggcaaccatgggaccgctcgcgcatgaccgcccggcagatacccctgcaccaggccgccatcgcctacggcaccgcctacgagaccgtacgcgccgccaacgggcccgacgggatccgcgcgcgcatcgaatgctggagcccgcgcgaggccatcgccctgtacgacgaccccgcccgcgacacatacccccagctgttcatgcgacgccgacgcctcaacgaaacacgcgaaagcctcgaactgtgggacgcatacaacatctggacatggatccacgccgacggcgcgtggacattcgccgacgccaccccgcacaacgcgaccgacccgaacggacaacccgtctgcccagctatccgcttcaccaaccagatcgacctcgaaggacgcacccccggcgaggtcgaaccctacatcgcgctcgccaaccgcttgaacaaggacaactacgaccgcatgctcgcccagcactacaacagctggcgcgtgcgcaccgccaccggactggacatgaccgaactgtccgacgcgcaacgcgaggacaggaaggccaaactcgcgcaggaggacatcctcgccggcgggccggacgtgaagttcggcaccctgccggagacctcgttggacaacctcgtcaacgcgcgccaggccgacgtggaggaactcgccgccgtcagccagacccccaccaccgcgttcggcaagatggtcaacgtcggcgacgcgggcatcgaggaatcccgcgccggcttctacgcgaaacgcaacgagcgccgcaagtcgttcggcgtcggccacctcgacgcgctgcgcctcgccgccggcatcgaaggccgcaccgaagacgcggccaacttcgacctgacccccttgtgggaggacaccgacacgcgcaccgtcagccaggccgtcgacgcgctcggcaaggccagcaagatgctcggcgtgccgcaggaggagctctgggacatgatccccggcgtcaccaagacacgagccgactcatggcgcgcatggaaggagaaccatcccgacgcggacgccctggccgttcaggcgtacgccagccagctcgcgccggccacgaccggaggcgacgatggcctcgaccggtaaaggcgcgctcctgaccgaccaacaccgccgacgccaagtcagcctcgccatcaccgccgacagccaggcgcgacgcgcctgggacgccaccctcgacctcaacgacctcaccggcacgcagccgatctggaaacgcaccatgctcaacctcatacagacatggtggcgcatcagcgaacaggccgcgctcgcatacctgccgcaataccgcgaggcggaaaccggcgaaggcccgggcatcgagatcggcgtgcagcagttcgaccgccggcgtgccggcgaaaaactcgactggctcggatccacgaacgtgaaatggcacctcgcctccggagacacccccgaggacgcctaccgcaaggcacgcgaactgttcctcggcgtcttccacgaggccgtgctcaccggaggccgctccgccatcgaacactgggcgcaacaggacacacgcgccatcggatggcggcgcgtatccgacggcgacccctgcgcgttctgcgcaatgctcgtcacgcgcggccccgtctacaccagcgcaaagaaagccggcctgcgcgccagcgacggcaagaaataccacccccactgcgggtgcaccgtcgaggtcgtctacggcgactgggaacccacccagcaggaacagcagtggatcgacgaatactacaaggccgccgaaagcctgcccgaacgaaccccacgcaccgcacaggacatcctgccgatcatgcgccgcaacggcgcgttcagggactcccgatcgatacgcggaaccaaaacggcgctcgccgcccgtcgggccgaacggtacgacaggaagatcgccgggctccgagacaagacgctgaaccacatcctgcgaggcgaaggcgacggcagacgcggcggccacctgtacggcaccggagtcgccgggaaaaccgaattcccgcagcaatgggacgaacggcgaatcgccacggccatcaaccggaccatcaaaacacccgactggcatatcgacgctcccgatcctagggcgttgcatcgattcgggaaaaccatagatggggtccagatcgaagtcaaggcgtacctgcaggacggcgaatacgtcatcgaccgcgcatatccggtcggaggcgaaggcgtgaccagaaacaccgaaaacggtagaatcgacgtgaaggcaagccggtcgaagaagtggaggcaaccatgagcgccgcatcggagcgcatgacgcgactctccctcgaatcactgaaggtcgtcgaaggactcaacccggacatcgaggaagacgccatggaggagatcgactgcggcgaatgggacggggcaatcatggatgcactcgatctggcacacgaccgcaaggacctgtggccgaagttccccgaagaggtcaaagccatgaccagagaccccgaatggccagacctccaccgcttcgcatacatgttcgaccggacgtaacgcgacaccggtcaaccaaacccaagccatccgcaccacgggtggcttttttcatgcccaaacaccattcgagcggaggggccttgcgttttccccccattccaacgcagataggaaaaccgggaagcacccctctgctcattgccggttatttcacgactgcggaggccctcccggttcccccatcatgcatcatcggcgggttgccggagcggtcgaacgggcccgactgtaaatcgggcgcatcacgccacgcaggttcgaatcctgcgcccgccacaacacacacatcaccgaaaggatcaccatgagcgacgacagcacgttggaaaaccagacgaacgaatcggatgaggccgccatcacgaaaggaaccgaacccgattccgccaacgacgacgcggacaaggccccgtgggagaagaacggcgaggaattcagcccggagaaggcgtggaatctcatccgcaacctcagggccgacaacgccaagctcaaggaaagcgacgacgcgaaggccgtgaagctgcgcgagatcgaggacgcgaacctcagcgagaaggagaaggcggaccgcgacctcaaggaggcgcgggagcagctcgacgcgatccgcacgcagaaggcatgggccgaggcgatggcagaacaccagtgcctgaccaaggaggacttcgacctcatcggcgcaggctcgccgcaggaggtcagggaaaaggccgcgaagctcgcggcgcgtctcgacgcgcaggccgtgtcgaagacggactccaaccacatcaacccgctgctgcgggccgacccgaccgggggcacggatccgacttcgaagaagacggacgactggatgcgctcggcgctggccagatagcggcatcaacacatcaaaggagacatgatatggcagacaatttcagctcgcagatcctgcgcggcgacttgggcggcgcgctcatccccgacgagatcagccaggagatcatccagacgcttccgcagtccagcgtgctgcttacccgcgcgcgccgggtgccgatgagcagcaagaagaagacgcagccggtgctcgcctcgcttcccgaagcgtactgggtgtccgaaggcggactcaagcagacgtcaaagaccggatgggaggacgtgcagatcacggccgaggagctcgcggtgatcgtcccgatccccgattcggtcgtggacgacgcgaagatcaacctgtgggatacggtcaagccgctcatcgccgaggccatgggcaagaagatcgaccaggcgggcatcttcggcgtggacaagccgtccacatggggcaacgacatcctcgccggcgccaccgccgccggcacgaacgtcgcgtccggcaccggagtcgacctcgccgacgacatcgccatgatcggccagaagctcagcgagaagggcttcgcggtcaacggcttcgcctcccagcccggcctgaactggcagcttgcccgcctgcgcgacgcgaacggccagccgatctacacgccgtccgtcgcggccggcaaccccgccagcctgtacggctacccgctcaacgaggtcgccaacggcgcgtgggacaccaccaaggccatgctgctcgcggccgactggacgaagttcgtggtcggcgtgcgtcaggacatcacctacaaggtcttcgaccagggcgtcatctccgacaccgcgggcaacgtggtgtacaacctcatgcagcaggacgcgcaggccatgcgcgtggtcatgcgcgtcggcttcgccgtcgccaacccgctcacccgcatcgcggccaagggaagccagtatccggccggcttcctcacccccgccgcctccaggaaggcgggcaagtgatgaccgccaaacaggtcaggttcgtcaccaacgacgaaccgtttgacaaccagaacgtcgccgaactggccgcgttcgacgcggccggcaaacccgtgaccatcaccggcggatccgcgccgaccgtggacaccctccacggcgcgaccgacaccggccgggccgtgatgaaggccacgaacgccgccgcggcacgctcggctatcggggccggaacgccgtacgcgctgcccgccgccggcgccgccatcggcggagtcaagaaggccacggccgtcgccgacctcgcatccgccgcggacaccgccgccatcatcgccacggtcaacgccgtgctcgccgcgttccgcgcatccggcgcgatggccgcgcccacgtccggcgcgatggccgcgcccacgtccgccgaccagccgtccgaagtccagtccgcggcgatcgtgacgccccaacagtagaggggacgctcccatggccgaaaaaccaccgttcgccgaaccggacgcgctcgccgaatggatcggcgagggcatcgacgcgacctcggcggactggaaacgcgcccgccgcgtgctgcgcgccgcctccaacctcgtacgcacccagaccggccgcgactggctcaacgacgacgggacgctggacaacccgctgcccgaacagctggtggacgtgaccgtcgcgtgcgccgcacggttctacctcaacccgaacgcggagacgcagtggtcgaggcagatcgacgacgcgatggacggcggcagccgcaaggtcgacgagccgggcatgagcctgaccgccagcgaaaaagccacattggccaagctcatggccgacgccagtccgctcatcgcgggcgtcggcgtcatctccaccacgcgcggggaacatgccagccaggacatgtccccgtactggtcggaggacgacggccggcccggattcctgcacgcgaggctgaccggatgagcgcgggattcagcccggccagcctcagacggctgcgctcctgggcgaccggtctcatgaccgacgaatgccggatcgtcagtcacggcaggcccgtcacggacccccacaccgggaaggcgaccagtcccgaaacggtccggtacgagggccggtgcaaagtgcagaccagcggcggcctcgccgcagagaacacggagggcggcatcgtccaggccttgggcgcggtcacccccgtgtggtcgctctacctgcatctgccctacgggaccacgggcctgtctcccggggacgtggccgagatcaccgcggccacggacccgaacctcaagggcaggaagttccggctgctgaacatgcagtccgagaaaacgcacgccaccgcatgccggtggaacgtcaaggaagtaggcaacagcaatgagcagtgacgtcacgatcgacgccggcgagctgaccgcgttcggccgccgggtcgccgccgctcacgcgatggccggggtcagtatcgccaaggccgtgaagaagggggctcaggtcgtcaaggagaaaacccaaagcgacctgaattccagcagcaacggcggattgcacgttgttcgtgtgagatacgagttggggaccaccggctcgcagatatacgcggacataggccccgaagattccggcaaaacccgcgaacacgggcacacgggccccaccgtcgccgcgatcgccttctacggcaccgcgcgaggcggcggaacgcacaagccccccgagcattacgccgaagaagagttgcccacgctcgccgaatacgtgggcgacgccgccgacgacatgttgataggagccatcggattatgagcgtcatggacatgacctccgccgtgctcggcatgatccccggactcgaccaacccgtgtacctcaaccaggagccggacgaatccgagatgccgccgtgggtcatcgccgcctgcaccacggacggccaccggtctaccgaggcggcacggtacacggcccacgtgggacggctggagatccgggtcgtggacctgacggccgacgcggtcaacgtcatctgcgatgaccggatcatccccgcgatgaaataccgggtgcccgcgaaaacctccgggttcacggtcgggcagctgatcctcgacgcggattccggcgcgtacgcggccggcctgaccgccgacgacacgtcgcgccgctatcaggtgcgcgtcctgcggttccgcttcacgtggacccgcccgtagacaaccaatcatttaccagaagtcttcaaggccatcccatacgaggtggcctttcccatcgaaggagaacatcatgaccctgaaactgggtaccgagatccccggcacgagcgccgagggcaacatcaccacactgtgggtgccgaccatcgccgacatcaagcgcccgaccatggccgagctggaagcaggcaccgacatctcgaactacgtgatgctcggcggctggaccttcgagccctcccaggacaccgtgagcgaccagcgcgagaacagcacgcaggacttcggagcacccgggcgcaagagcgccggcgacatctcgatcgaggtgatcgataatacgaacacggagcacgcggaacagaacaaggccgtcacgctcatggccgaaggcagctccggattcatcgtgcgccgtcgcggcatggccacggacgcgcccctcgccgcagggcagaagctcaccgtcgtgagcgtcaagtgcggcgagaagaaggtcctcaacccggacgcgaacaccatgatccgaagcgccatccccctgttcgcgcaagcgccaggctgggagtccgaaaccgccgagatcgtggcggccgcggcctcacacgcctgaccatcattcttccgtgcgggctttccgcattcctttccccgcacggaaccccttcatcaccaaagggacgcgaaaccgagacaaggaacgcaccatggcattggaagtcaagcgcaagcgcgtcgaggtcgacctgatcctcgaccaggagaaggcagaacggatctcgcagctgggcgagcagctcgcccgggcgggggcatcgcacgtcaccgagggcgcgaacgccgcggccaaacgcatcgccagacagatcgacgagctgcgcgaggaggtctccgggcagatcgtgcacctcacgttggaggccctgccattgtcgcagtggaggcaggtgctcgaggcgaacacgaccaccacgaaggacgggcgcgccgcgcagcgcctcgaggacatcaccgccgacgcgctcaggctgatgatccgcaagagcgtgccggaaacgcccgtcgaggatatagccgccatcatccccgaactgtccgacgggcagctgtcgcccgtctggtacgccatccagaacctcaacgcgaggatgatcgacccaaaagactacctcggccaagcctccaggataatccggggctcgtccgggaactgaggatctgcgccaggctcggcatcagctacaagcgctggctcgggtgggagccctcctatcgcgtggagcgcgatggccaccggcgcatcaccgggtacacgccggaaagcgaatgggaccagaccgaacgcgactggatgctcgccctcgacgactacgagcacagcctgtgcccgcgctgcggcatgcccgtgagcgtatgtcacgacgagctgacgcccacccggtacacggccgaggcgggcgtgtgccagatcagcctcatgcgagacatcgccgccgaggactggcgcaaacagcacgacggcgaggcgggcatcaagaccatgtcgctgaccaccgccatcaaggcaagataaggagaccaccatggcaggcgggctgaaccgcaacatcaccgtccgcctgctcgcggacacgtcgaaattcaccgccggcatggccaaggtgtccgccgaggccgagaagacctccaccaccatggaggcgtcgggcggcaagacgaagctcctgaccgccggaatcgccgccgccggcatcgccgccaccgcattgggcgtcgccgccgtacgcatggccgccgacttcgacgccggcatgtcgaccgtccaggccaacaccggagccagcgccgacgagatgtccctgctacgccaggccgccatcgacgccggcgccgacaccgtgtactccgccacggacgcggccgacgcgatcaacgaactcggcaaggccggcatgagcacgtcggacatcctctccggcggcctgaacggcgcactcgacctcgccgcgtccgacggcatggaagtcgccgaagccgccgaactcatgagctccgccatggcccagttcaacctcaccggagccgacgccacccgcatcgccgacgccctcgccgccggagccggcaaggcgcaaggctccgcccgagacctcggctacgccctccaacagtcaggcatggtcgccaacagcttcggcatcggcatggaggagaccgtcggcaccctcaccagcttcgccaacgccggcatgaccggatccgacgccggcaccagcctcaaaagcatgctcatcgcgctcgccaaccccaccaaaaaagcgcagaacctcatggacgagctcggcatcagcgcctacgacgcccaaggcgacttcatcggcctcaaagccctggccggccagctccagacccagatgagcggactcacacaggcacaacgcaaccaggcgctcgccaccatcttcggctccgacgcgatccgcgccgccaacgtgctctacaacgagggcgccgacggcatcgccgactggaccaagaaggtctccgattccgggtacgccgcccagcaggccgccgccaagaacgacaacctgcgcggagacctggaaaacctcagcggcagcttcgagagcatgatgatcaagctcggcgaaggcgggcaggggcccctgcgcaagctcgtccagaccatcgacatgctcgtggacggattcgggcaattgcccgcccccgtccaacagaccatcgtcctctccacggcgctcgccggaggcatcgtcgcgcttcaccgcgcgatggcaccgttgaattcaagcagcagccagctgtcaaagaatctcggcatggttctcgaccccggccagcggcttatctccatgagctcgcaactgtatacgggcgccacgcaaatcggggcggcgttctcaacccagagccgtcagctggaggttttcggcagcaccgtcagtcgcacctcaggcgtcatgaccggattgaaaaccatgggcagcggcgtcatcgacctgctcggaggcccatggggcattgccataacggcagccggtctcgcattgttcgatttcgcgcaggatcagcaggccgccgcacaacgagtggacgaactcacccaagtgctgcagagcggacagaccgcggccgaatacttcggcaaggcactctccgacagctcatccagccgatacaccgacgacttcctcagccgatgggccagcggatacgacgacatcgccgaagccatcgaccgcatgggcatcagccaccagacctacatcaaagccatccaaggcgacaaggacgccatcgaacaggtccacgcccaggccgacgaatacgcggccagcctcaacctcatcgaccaatggtggaacaacccgtcaagcgccgcctacgaggcgctcgccgaacagcagaacgtcttcaagcaggcgaccaaggacgcggccgaggcggagaaggccgcgaccgaggccagcatgggcaggaccgcggccctcataaccggcaacgacgcgctggccgggaccgccgacgcatccgccaaggccgcggactccgacacgatcctgcaggagagcttcggcgcgaccaaggacgcggtcaacgagacgagcgccgcgctgggcgaggtcatcgacgcgctcaacacctactacggtttcgctctggacgcgtccaacgcgtctatcgcgctggaatccagcttcgacaaggcatccgaagcggtcagggagaacggcaggacgctcgacatcaacaccgaaaagggccgcgacaacacgagcgccctgaacgacgtggccgaggccgcgcagaaggccatgctcgcccacgcgaagaacggcgagggactggaacaggtcacgcccatcgtccagagggcccgcgaccagtacatccagctcgcccagcagatgggcatgagcaaggaggaggccgaggcctcggccgacgcgtacgggttgaacaccgacaagctcagggacctcatcgtccaatcgggcatcgcaagcggacagaccggtgacctgcaagccgccttcgaccggctcggattgagcaccagcgacgtcaagctcaaggtcgacaacatggtcggcagcatgcgcctcataccagcggagaaaaccacgaccgtgagggtcaacgacctcgcatcgaacgcgatccacaccatccgggaaggcatcgagctgctgcagtccaagaccgtcaccatccgcacgaacgtgatcacgaacgagacgacgatccgcagcacgaagggctcgatgatcggccgtcccatctcctacacgggcggctactacgccggcaacggcttcgcgatgcgcggctacgcgtcgggcggcatcgtggaggggctgctgcccggcactccgcccctgtcggcgcaggcggacaacatcacgctcgccaacgcgaggctgcgcagcggcgagttcgtcagcaacgacaaaagcgtccgatattacggtgccgacacgtatgcggccatgaaccgccgccagcttccgagggagatgttcacgggcggcgcggaacagccggggccctcggtggcggacatctcccagggcgtgatggacgcgctggaacgcacctcggtcaccctcgtgttcgacgaccgcaccgtcgcggcgcggctcgcccccgcgatggacagggaactgggacgaaggaaaggaatgggactgtgagcgtcttccaacgcatgccggccgacccgctcatgcacatcctcctcgacggcaggccgcttgactggtacgggctgtccgccacggacggcgtcctcgccatcgaggcccccgacctggccgtcgcataccagaacgcgcccggcatggccggaagccacgacgtgaccctcgacgacccgctcggctgcgcgtaccccgggctgcgcaggatcgcgctcggcgtggtgaccgtcggcgaggacgacgagatgatggacgcgcgccgccgcctcggctcgctcgtcggccgcctcgcgacgctgtcctaccgggagctgccggggcagtggcggggccgcgtcacgatcaaggactgggacgaacgcatgctcggaccatgccgcgtggactgcgccaccacgatcgtgatggacgcatacccgcacatcatgggccgcgcccagcgtcacgcgctcagggaaggcgccaacctcctgcacgtcaccggcaaccgtccggcatggccggtcctgacgctcacgacctcccgcgccgtctcggccctgtcgatcagggacgggcgcggccacaccatcggcatcaggccggccgccacgctgccggccggcacaagcgtgctggtcgactgcaaggcgcagacgacgcgcgccaacggcaccctcgccccggtcagcctcgacaccgactacttcgccctgctgccgggcatgaacacgctcaccctgtccggcgccgccggcagctgcgagcacgaacccgaatggatgatctgacatgttccacgtcttcgaccggtggggcaacccgaaacccgcccccatgaccgtcctcgccgcccggcgcacgcagaacgtggacggcaccgacaacctcgacctgctcagcgacctcgacctcgaaaaaggcgaccgagtggcatggcgcgaccacatgggcctgtggcgagaatggctggtcaacagcatcgatacgtcacgctccgaccggctccccctgtccaccgcgcactgcgtcgacgccatccaggaactcgcctccacgtatatcgaggacaaacgcaaccgctcggccaccgccctcacatgcgcgaaaaaagcgctcgcgggcacacgatggattctcggcaccgtgcacgacggcaccaaaaccaccgaggccgacctcgcgttctaccacaccaacgcgctctccgcaatccaggacatctgcgccacgttcggactcgaggccgtcaccacctaccagcccgacgcgacgggcacgcgcatcgcgacccgcaccctcagcctcgtcagccggcgcggcgcgaccacccccaccaaacgcttcacctacggcaaggacctcgcctcgatccgccgcaccatcgacgccacccaggtcgccacacgcctctacggatggggcaaaggcgtcgccacgaccgacgacgatggggaagagaccggcgggtacagccgcaagatcagcttcgccgacatcaacgacggcaaggcctacgtcgaagacgccacggcactcgccatatggggcatccccggccccaacggaacccgcatccacagcgaggcagacgcggaattccccgactgcgaagaccccaaacaactcctgacgttcaccaaggaagcgctcaagacacgcagccagccggtcgtctcatacgaatgcgacgtcaccagcctcgccgccgccggcgtcaacgccgaaggcaccgacatcggcgacaccgtccacatcatcgacaccagcttccccacgcccctgcgcctcgaaggacgcatcctgcagatcgaacaggacctcgccggcgaccagaccgccaccaccatcaccctcggcaacatcaccacaggcatcacccgccaggacgacgcatggcgccgacaactcgaccagctcatctccaactccggcgcatggaacgacgccgccaccggcaccaaaccatacatcaccgacctcatcaaccgcatcaaccagatcatgaacacgaccggcggctacacatacctcaaacccggccaaggcatctacgtgtacgacaagcccgaagaccagaaccccacccaatgcatccacatcggaggcggatactggcgcatcgccaacagcaagaaggcgaacggagactgggacttccgcgcgctcgccgacggcaacggcatctacgccaacgccatatacacaggcaagctctccgatgccgccggccacaaccaatggaacctcgacaccggagaactcaccacccgcggcatgaccgccaccagcatcaccgccgaaggaaccttcgcgtgcggcagcaaggactggtacggcatcgagctcaacagcatcggacagctcgccggctaccgcaagggcaagaaggtcggctacatcgactactcgggcggcatgtacgaggtatccaacccgtcgaaggtctactacgggctccaactgcaaggcggatgcctgcgcatcagcacgcccatcctgtccgtcgccaagaccaccgacacccacgtcaccaccacacacgcctacaacggcaaacaccactacatctccaaaatcacatcctcctcggacggcaccatcacctggttccaatcaacgaccgagtacatcaacggattctgcatcaactgaaaggacacccatgccaaggatcaccagatactgggcgcacgaccccatcggcaacagcgagggcatcctcgccggatacgagcccgccgcgctcaaggccgcgcaggaccggggcatcatcttcatcgccgaactcgacgacggcacccgactgcgcgtcgacgccagcgacgtcaccgaacccgaaccagcctcgtacaccatcgccacacccgactacgtggccagccgcgtcacgctcatcacggacgcgctcgacgccgtcgccgacatcctcgacccccagccgacggcgctcgccacggccaatgacgccgccgcggacacctccggagacgacgcacgccgacgcctgcgcgacgccatcgcccacctcaacgacctcacgaaaggaacagggaaatgaccctcgacggattccgcgacgtcaccgaaacacccatcagcctcgacttctccaacagctggatcgccgacatccgactcaacgccggcgacaaggacggacgcaccatcaccgtcgccatcaccgacaacggccagccaatcacctccacgaccggcatcacaagcgtggcgctcgcctacaacaccgcgccgggcgtcgaggtcggcgaccgcgtgcccatgacccccgtgagcgggcaggagaccgccacataccgggcgacgctgcccaggcgggcgatcgccaagcccggcgtcatcgccctgggcgtggaggtcaccaccgcggacggcgccaagatctgctcccgcaacttcaagggcgtcgtcgaacgcgccgtatgggacgccgaaagcacccaggggcaggacagcctcacccgcctcgaacaactcatcgcggacggcgacgccgccatcatccgcgtcaacaacgccatcaccgacgcgaacaacgcggtcgcggccgccaaccaggtcatcgcggacgcgcgcatcaccggcggcaacaccaccaccctcgacccgaaccagccggccacgtcctcgctgcgcggcagcggcctgcagcgcatcctcgacctgtccatcccgcgcggcgcgggcgtcaccagcgccggcgccaccaccctggaccccaacaagcccgccaccgcgagcatgctgcaggccggaagcaagggcgactacacgctgatggtcggcgtgccacgcggcagcaggatcatcggcgtgggcgcgaacaccgtcaacccctcccaggacgcgtccgccagcatgtccaccgacggcgcgggcgacatgagcctcatcctcgacatcccgcgcggcagccggatcgccggcgtgaccgcccgcaccctcgccaccggcgaggacgccaccgtcaccgccacccgggacgcggccggcgacgccacgctcgcgttcggcctgccgcggggagcaaagggcgacaagggcgatcccggggatgccgggcaggtcgccaccgccaccgtcgccggcgtcgtcaagcccggcgacaacctgagcgtgcgcgccgacggcacgctcgacgccgccgcggcccagtacgagctgcccgtcgcgagcgacacgaccctcggcggcgtcaaggtcagcaaggtcgactacacggacgcccgcacgttccccgtcgtcgtgtgcgacggcgagaaactcggcctgtcgttcaaactcggagacaacgccatgcccgacggcatcgagttccacggcaccgagaacacgaccatcggcctgaagaaggccacgcaggacgcgctcggcatcgtcaggggagggggcaaaggcatccatgtcgccgtggacggcaccctcaaccttgacctgcccgcggcgacggcgggcgcgatcggcggcgtcaagcccgacggcaagaccatcaccgccgccgcggacggcaccatcaccgccgtcgcgcagacaggcccggtggagtacagggagctcgtcggatacgagaacgcggcgcagggatacgcggtccgcgtctccgacaggacatggctgtgctgcttcaactcgttcgccatgcagacggacggcacgacacgactgccatacttctatgcctttctccggcaggccggctcctcgagcctgaccgcgctggtggccaacccgttcgacacgaacggcatcaccctcctctccaccgacggcgaacagatgcggttctcgtacggagggggcgggcgctgggccggcgtgcgcgcggtatccggcttggacgccgccaccctcatcctcaccgaggcctgagcatggacgccatcatcatcagcgtcaccgggagccttacaaggaaggagcactcatgacattggtgcatttccacctgaccgacgccgaggggcgcggtctggatggcagcgtgagcctcgtgcccacgaggcgcgtcacggtcgccgatgctatccgtctgccggtcgcgcagaccgtcaggcttacggcgggcgaggccacggcggaggtgatgccctcgacgacccagtgggcgtggagggcgtctgagctcgtggcgggcggaatcgtgcgatacgtcgaggtgcccgacaaggagtcggcggaatactcagggctggcggacgtggatctcaagaccctggaccaatcctcggagaccgtggccgcgtgggagctcgtcacgcgtgccgcgcagggcgtgctcgaccggatcggcacgatcgacgacaaggtgcagtccgccgcggcttcggccgctgcggcgaaggcgtcggaaacggtggccagccaggaaagcgcgaaggccgccgctgcggcaggcaaggcgcaatcctcccagtccgaggcggccaaaagcgcacaggcggcgcacgagtcggagatcacggccaatggtctgatcggcgaggcgaagaccatcgccggtcagctcaccgaaaccgccggacaggtcaagcaggatgcggccacggcatcccgggcggcgcagaccgccaccgtcaaggccgatgccgccgctaccgcccgggatagagcggaaacggcggggcgcggccgtcggatggcccccaaacgtctcgaccggctcgaccgcaccgtgggattccaccaccacacacagagaggatcgccaatgcgacatcccatcagagaggagccacatggctgacgacatcatcaccagcgtcgtcgccggcctcctcatcgccgccatcagcgccatagccgccggcctctggcaccaactcaaaaacctgcgctcgcagatcgccgacgaggagacccgaaggtcggagcatgagcagctgatggccgacatgaggcgcggctgcgaacacgaaaaactcgtagacgaggcgctgcgcacgcttctgctgtgcaagctcgaacagcagcaggacacgatggtgcacgaccaccacggcgtcgccgacaatgacttcaaactccgcgcccaacgtgtctacgacgcctatcacggattgggcggcaacggccacggcacccaggtcaacaacgatatccagaatgcgcccattgcgccccggctgggaggaaagccatcatgagcatcaccatcaacggcgtcaagcccggcacggccacattgaccatccgggctgacacccagtaggttgatgcgcccgtcaccgtgcgggagcacctgtgacggtggcttccgatgccggccacgatgttcggcgtcacctacgcggacgcccatctgagcgtccgcctctataaaaccgactgacctaagtcccacacccgtggggcttcttttgtaaggagaaccattatggcaaacaccaccggcgtggccgaccacaaggccaccggcccggcgattcccggcctgaccgtggaacgcaccaaggcgatcatcctgctcatcgtccaattattcagcgtcgcgcagaccggcctgagcatcgccggcatcagccagctcccgttcaccaccgatcaggtgagcaccgcgatcaccggcgtcatcgccgtcatcgcatccgtgtacgcatggtggcgcaacaacaacctgaccggtgccgcagtgcagggacagcagctcaccaacgcgctcaaagccaatatcatcgccaccgccaccgacgccacgaccgggacagctcaggcggcctacgcggtgtccgactccaggggagccgacgcgaccgctgacgtggcacccatcgaggaggtgtcctatggcgacggcgagtgaagtcctgcgcatcgcggcgggcgaaatcggctattcccgttggaccgacccgcagccgggcacgaagtacgggcgctggtacgcccaatcccacggctcatactatggcgcgtcgggcgtcccgttctgcgcgatgttcgtcagctgggtcatgagccgtgccggccaagcgttcccgggactgcccgccgcctacgtgccatacgtgctcagcgcgggacgctcccgcgcggtcagcacgcgcagcgccaaacccggcgacatcgtgatattcaactgggacggcggcgtggtggaccacatcggcttcgtggaagccaaccacggctcgtacatccagaccatcgagggcaacaccaacaacgggcgcgtagcacgccgcacccgcgcatggaacaccatcgccgccatcctgcgccccgcctacagtggcagcgccacgtcgtccggcggcggcaccgcatccagcggcggcacgggccggctcacggtagacggctcctgcgggccggccaccatccgccgctggcagcaggtcatgggcaccagcgtggacggcatcatcagcggccagtacaggccggacggccggacatggggccgacccgcgctcgtggactcgtgcgtgcgctacggtggcggcggctccaacctcatccgcgccgtccaacgcaagctcaacctcaccgcggacgggctcctcggccccgccaccatccgcgccctgcagaaacacctcggcgtcgcccaggactcatggttcggccccggcaccgcacgcgcactccaaagccgcctcaacaccggcagattctaaacacaagcgcccctcgactcctatgcatggagccgaggggcgcttctgcatgcctgcgtcagaggcgggactcgaactcgtcgatcgtcatctcgagcgcgtccgccactcttctggccgtgccgagcgccatgagcctcgggtcgcgcacgcccctgacccactcgttgacccgctgtctggtaagtccggcggcgcgcgcgatctgcgactgccgtatcccccgttcatccagcatatccgcgaacgtcatccgttccgcctccccgccaggtatccgagcgtcccggcgcacagcgccagcacgcctgccggtatcgagtgtccggacagcccggcggcgaacgcgccgagcgccatgaccagcgagcataatcccagtctgtcgttcatgatgtcccatgcgataggatgggagccgggccttccggatagttgggatattcggaaggccctttcctcaccgcctgcgccgcctccgtggcggcctgcgcggttcgggcttccggtggagggcaatcaccaccgtggctatgggtgctatgaccgccccgagcccggcgagaaattcgcccgccgccttcagcagctccgtgacctgttgcatgttcacctcctttccttgccgactcctccattgtaacccaaacgggttacaatgtcaagccggaggaaccccgacacaccgtatccacaccattctcggcaccctatttttgcccacattttgcccacattctcacggaaaaacagggtgaacagggaaaaacggataaacaaaaaagcccctcagcctgaaccgcaccccgattgttggactgaagaaattcagattcgatgatcggaggtgcggttcacaatgctgggggaggggccttttcttgtttcgggtgatatcatacggagcaaacagcagattggagtcggttctgagtgacatttgagtgacattgaaacgcggagccaaccacgagaacgcattgtggcgcgtcaggctataaccaccgtttataacgacaccttaatgcttctgatggcctcgcaatcggcgggttttggtaatctaggcgggtcatagtcgtacataacggaggattcatgcctgcacttacatccgtctcgggattcccgcgcatcggacagaatcgtgaactgaagaagatcatcgaagcctactggaagggcgccgcctcactcgacgaggtgcgcggcaccgccaaggaacttcgcgcgaagcactggaagctgcaggcacaggccggcgtcgatctcatccccagcaacgacttcagctactatgaccagatgctggacaccgcgatcctgctcaacgtcatcccgcagcgttacaagcgactcgccttcacgaaccccgaggagacgctgttcgccatgggccgcggctatcagggcgacaagggcgacgtgaccgccctgccgatgaagaagtggttcaccaccaactaccactacatcgttcctgaaatcgaggagagcaccgagatccgcctcaacggcaccaagccgttcgacgagttcaacgaggcaaaggcccggggcatcctcaccaaaccggtgctgatcggcccctacaccttcctcaagctcgcccgcaacgcgcaggccgaggagctcacctacgacaagggcctggtgaacgcggtcgccgccgtctacgcggaagtgatcaagcgcttcgccgcactcggcgcccagtggctgcagctcgacgagccgtacctcgtgctcgacaaggaggacggcgacgtctccctcttcaagagcctgtacgcgaagatcctgcccgctcgcgaagacaagatcaaggtgctgctcaacacgtacttcggccacatcgccgacgtgtacgagaccgtgaacctgctgggcttcgacggcatcggcctcgacctcaacgaaggcaaggacgagaacctcgccgcggtcgagaagtacggcgtcgccgagaacaccaccctgttcgcgggcgtggtcaacggccgcaacatctggcgcaacaactacgccgtcagcctcggcctgatcgacgcgcttcgccagaagaccgacaacgtggcggtatccaccgccagctccctgctgcacgtgccgttcagcaccgagggtgagaccgcccttgacccggccgtgctcaagcacttcgcgttcgctgtcgagaagctgaccgagctcaaggagatcgccgtcctcgccgactccgatgaggacgccaagaaggcatccgccgatctggccgccaaccaggcgctgttcgacggcacccgcgttgccgccgatccggcggtcgccgagcgcatcgccaagctcaccgacgccgacttcgtgcgccagccggcccgcgccgagcgtcagaaggagcagcgtgtcgcccttggcctgccgctgctgcccaccaccaccatcggctccttcccgcagaccaaggagattcgcgccgaacgcgccaagctgcgtaagggcgagatcaccaaggccgaatacgacgagttcatgaaggcccagatcgacgcctgcatcaggcaccaggagcagatcggcctcgatgtgctggttcacggcgagttcgagcgcaacgacatggtcgagtacttcggccagaacctcaacggcttcctgttcaccaagaacgcctgggtgcagtcctacggcacgcgctgcgtcaagcctccgatcgtgtggggcgacgtctcccgcgccaacccgatcacggtggaatggtccgcctacgcgcagtcccgcaccaaccatgtgatgaagggcatgctcaccggcccggtgaccatcctcaactggtcctggccgcgcgaggacatcacgcacgagcagcagacccagcagctggctctcgccatccgcgacgaggtgctcgacctggaggccgccggcatcaaggtcatccagatcgacgaggccgcgctgcgcgagaagctgccgctgcgcaagaccgactggcacgccaagtaccttgactgggccatcccggcgttccgtctcgtgcactccgcagtcaagccgaccacgcagatccacacgcacatgtgctactcggagttcaacgacatcatccgcgacatcgacgcgatggacgccgacgtaatctccttcgaggcgtcccgtggcgatctggtcgtgcttgacgcgatccatgacgcgcacttcgagaccgaggctggcccgggcgtctacgacatccactcgccgcgcatccccggcgagcaggagattgaggaccgcatctacgagattctcaagaagatggacatcgagaaggtgtggatcaaccccgactgcggtctgaagacccgtggtaacgccgagacctggccgagccttgagcacatggtcgccgccgccaaggcggttcgcgccaagatcacgaagtaggaccctataggcccctgctggcgggggcaacttcatacttgtagtaaggaacctgatatgcacacacccatgttttcgctggaggtgttccctcccaagcgggacgcccccgtcgggaccatctacgacacgcttgacgggctcgaaggcctgaaccccgacttcatctcggtcacctacgggcacggcacgcattcggaccgcaccgccaccgcgcgcatcgccaacacgatccacggggaatacggcatccccgccgtggcgcatctgaccgccctgtactcggacgaggcgaagatcgacgaggcgctcgacatgttcgaggcggcaggagtctccgccgtgctcgccctgcgcggcgactacatcgacggcgaggagccggtcggccgcttcaaccacgccagcgacctcgcggcctacatccacgaccgcaagcccgacctcaaggtgttcggcgcctgctatcctgaaggccactattcggccgcctcgctcgacgaggacatcgagaacctgaaaatcaaggtggacgccggcgtcacgcatctgatctcccagctgttctacgacaacgacgacttctaccgtttcctcgacaaggctcatgcggccggcatcgacgtgccgatcgaggcgggcatcatgcccgtgcgcggcgcaaagtcggtgcggcgcatggcgaaggtcaatgcctcgcgcatcccggctaagctcgaagcactgctcgaccgctggggagacgacatccagaacctgcgcgcggccggcatcatctacgcctccgaccagatcgcggacctcgtggcccacggcgtcgacggcgtgcacctgtattcgatgaatcatcccgccaccacacgccgcatatggcgcaacgtggagccgctgttcaccgtggaatgacactcccggcaaacagccgattacggcaaaatcgttggggccagacagtcatgcggctgtctggccccaaccatatgagaatgcgcggccggcaacagcacgccgcgtatctgccgtcagcgacggcgacgcttgctgcgcctgaagtcgggtttgggcgcgaaccacgcgatccgcgtggtcacggcccggcgaatcaccggaacgttggcgatagcgatgcccagagccacggcgatgagcgtcgtccacatggcgacgttcatggaggccagggcaagcacgacgacgaccgcgacgatggcgaagccgagcaccttctgcacggtcgcctgcacaggcgtcatcctctgcggctgcagcggcatggcaccggaaacaaagcccatcagcaagccgacgatggcgaagacgatggttacgatcagttctgcggatgacagttgcataccgccattatgtccatccggccacgacacggccgtgtcatcgcggccgaggaagcacggtttcttgtaaaattgtaggttatgactgttccgggaacctttgacaccagcgcgcgcgaactcatccacgcaggcctgcagaatctcgacgaagcccgttcactgttccgccagctctccgccagcggattcgatgcggcacgctgcggcctgctgcttgacgcgcttcagcatgtctgtgatcccgatgtcgcgctgcgcaacctcgtcgacatcgtcaacgcgcaggtgagccagggccgcgcgctggacgacatcatgcccgacgacacggcgttccgacagctggtcgccgtgctcggcgtctccgacgcgatgggcaagctgatgcggttccgccccgacctggttcaggccgcggcgaccgaccactgcaacagtcacctctacaaccatgaccagcgccgggcgcacgtgctcgaatccgtcggagccgacccgaacgaccgtatgtccccgacagccacgatggaccttgccgacgccgccaccgccctgcgcaggacgtaccgcaaccagttggccgccatcatcgcgcaggacaccatgagcgacgaccccatcgccctgcagccgcgcatcagcagtgagctgtccgacctcgccgatgcggcccttgaaggcgccctcgccatagcccggcatgagatcgccggcagcgagcactgccgtttcgccatcatcggcatgggcaagctcggcgcgcgcgaactcaactacgtgtccgacgtcgacctgatctacgtggtgaaggccgccgacgcggacaccagccagcagcagctgtaccgcatcggcacgaagatgggcacgatgttgcagcgcgtgtgccagtcggtgattatgggagtcgccgaaccggcactgtggcagatcgacgggggactgcggccggaaggcaaggatggctccctcgtgcgcacactggaatcacatcaggcatactacgagaaatgggcgcagaactgggagttccaggcgctccttaaggcgcgcccggtcgcgggggacccgcagatcggcgacgcatacatgagcatgaccaggcctatggtgtggagcgcgtcgaagcgcaagaacttcgtctacgactgtcagcagatgcgcaagcgcgtcgaggacctcatcgcgcccgcgctcaaggaccgcgagatcaaactcggccgcggcggcctgcgcgacgtggaattcaccgtgcagatgctgcagctcgtgcatggccgcaccgatgagtcgctgcgcaccaacgccacgctggaatcgctgcgcaggctgtccgagggcggctacgtgtcgcgcaagcaggccgcgaagctcgcccgggattacagcttcgaacgggtgatggagcatcgtcagcagatgtgggcgctcaagcgcacgcacctgttccccgacctcggcggcggcagcgtcggcggacttgagaagaagcgcgacgtcaacgtcgaaaagctcagccagaaccccgagctgcgcaggctcgcccgcgcgtttggcctgcacgccgaggagctggtcgcgaaatacgacgagacgcggcgcgaggtgcgccggctgcacatggacatctactaccgcccgatgctgccgatcgcggcgttgagcggtgaggatttctcgctcgccccgcaggtggcctacgaacggttcgcgtccatcggattcgccgacccggaggccgccatgcggcatgtggccgtgcttaccgcaggcgtgtcccgcgcctccaagatcaaccgcatactgctgccggccgtgctgcaatggctggggcaggggcagaaccccgacatggggttgctgaactggcgcaagcttgaggagcgtttcggcacggacagcgagtacctgggcttcctgcgcgactccaattcggctgcgcaacggctgtgccacgtcctgtcgaactcccgtttcctcggcgacgcgctgaacaagtccgtggagtcggtcacctggcttggcgacgatgacgcgctggtcgcacgctcgcgcgagagcctggacgtgcaatgccggtcctctctgagccgcaacgccgacgacatcaacgatttcgcgacgtcgatgcgagccatgaggcgccacgagatcgagcgcatcggtctggcctggctcagcggcgtgatggacgaggcggcgtgcctgaccggcatgaccgacgtgtacgacgccatcatcgatgcggccctgacatgggcaatccgctatcagacatcggcgatggggctcggcgagccgcctgccgcgatcgcggcgatcggcatggggcgctacggcggccaggaggtcaatttcagctccgacgccgacatgatcctgctgtataggcctgcggacggcaccgacgagcaggtcgccaaccagttcgcccgcaaggtggtcgacgtgctgcggcaggtgctgcaggggccgaccacgcttgagccgaagatcgagatcgacctggaccttcgccctgaaggcaagaacggcccgctgatccgctcgtacgcctcctgccgggagtactactcgtcatgggcgagcacgtgggagcatcaggcgctgctacgcgcccggctcgtcgccggggaccgggcgctcggtgaggatttccttcacgacatcgcggacccgctgcgatacccgataagcccgctcaccgacgcccagctcggtgagatccgcaaactcaaggcgcgcatggaagccgaacgcctaccgcgcggcgtgaggcgcgacaggcatctcaaactcggcaagggcggcctgtcggacgtcgaatggaccgtgcagctcctgcaactgcagcatgccggcgacaacgcctcgctgcgactgaattcgacactcgcgacgctggacgagctggaacgccgcaggttcatcgaccgcggggacgcggcggtgctgcgcaaggcgtggcgcatgtgcacggcggcccgcaacggcaactacctgtggaacggacgcgtctcgcaggccgacatcctgcccgacgacatgtactcgctgggcggcattgccgtgtatctgggatacgacgcccaccgcgggcagcatttcgaaaacgacctgatgggaacgatgcgcaaggcccgcgatgtggcagagcgtctgttttatggacgctgatatgagacagtcgcgtgtgtcgcctgcgaaaaatcagaaatctgcattatagtcggataggtcacttcagtggccaccttatccgcttcacgcatgaaaggtgagccgtgtcagtcacagaggagccggcggagacgccgttggtcggtcaaagcgtcatcacgctggatacgctttccatttcccagattcgagatttgctgcacaaggcggcatacatcgatgcgaaccgcaaacgcgtggcgcatacctgcgacggcagggtgttggccacgcttttttatgagcccagcacgcgcactcgcctgagcttcgagaccgccatgctgcggctcggcggccaggtcatcgggttcgccggcgcgcagctcgcctcggtgtccaagggggagtccatcgccgacacgctcaagaccgtgtccaactacgtggacgtggtcgccatccgccacccgaaggagggagcggcgctggtcgcctcgcgcgccgcgtccgtgcccgtgatcaacgcgggcgacggcggccacatgcaccccacgcagacgctcgccgacttggcgacgctgcaatcgcgcttcggtcgtgtcaccgacctgaccatcggcctgtgcggcgatctgacgttcggccgcaccgtgcattcgctgatcgagacgctgtgccgcttcggcaacgtgcgtttcgtgctgatcagccccgacgagctcaagaccccgcgctatgtgatcgaccgcatcaaggcgacgccgtcctgctcctacgtggaggtcaaggacctcgtctccgtgatcggcgacctcgacgtgctgtacatgacccgcgtgcagcaggagcgcttcttcaacgaggacgactacctgcgtctgcgcgacacgtacatcctcgacgaggacaagctctccaaggccaagccgagcatggccgtgctgcacccgctgccgcgcatcaacgagatcgccgtcgaggtcgacgccgacccgcgcgccgcctacttcgagcaggtcaagaacggcatgctcatgcgtatggcattggaaagctcgctggtcggagaccagctgccgggatatgagccactcgaccccaaggaggttcaggcctgatggaagtcaccagcattcaaaacggcatcatcatcgaccatgtgcccgccggcaccgcgctcaaggtgctggagtacctgaagatcgatccgtccaagacgcggctggcgctcatcatgaacgccgacagccacctgtacggcacgaaggacatcatcaagatcgaggatgaggaaaacgtcgatctcaacgtgctcggcctggtcgcccgtcaggccaccgtcggcatcgtgcgcggcggcaagatcgtccgcaagctcaagcccacgctgccggaacacgtggtgaacatcatcacctgcgtgaatccccgttgcgtgaccaccaccgagcgtggcatcgaccagatgttccatctcgtgcattcgcagcgtcaggagtaccgctgcgactactgcgacgaggaagccaagttctgacctcacgcccgtcgtttcgcggtttcggacgtcaagccctggcgaccgaaaccgcggtccagcgggtgcaaccgtcttcatcagagccaaccccacaaggagatgcatatgctgaccttacgcaacattcgcgtctgggacaccggcgagatcatcgacatggtgattccctcggccgacgcacgcaatcagccggaggacggcggcgtcatcgaaggtgacttcgacgccaccgggctgacggtcgcccccggcttcgccgatccgcacgtgcatttccgcgatcccggccagacctataaggaatccatggtgtccggctgcagggcggctgcgtcgggcggctacacgaacgtactcatcatgccgaacactgtccccgccatggacgggcgtgcggtgaaggccggcgcacccggtgccgcggaggtgctggacacaggctgcagcgacgtcatcgactacctgcagcattacgagcgggtgcacgacgtgtcgctgccggtgcgctacgacctgtgcgtatgcgcctctaaggaccgcgccggcgtcgaggcgagcgacccggccgactggctgcgccatctcgacggccatgacatggatggcaaggacgcgtggcaactggcccacccggtcaccgccatcagcgacgacggggccgcggtgacgcccggcctcctcgaccaggtgctcgccaacgtcaaggaggccggcctgtatctcatcgagcattgcgagcatcacgacaccggtgcggtcaacgacggcccggtttcccgcaagctcggcgtgccgggaatcccggaggacaccgaactgaagatcgtcgcgcgcgacatcgagaaggcgcgcgagaccggcgtgcacatccacttccagcatgtcagtacggccatctccttcgacgcgatccgcaaggccaaggcggaagggctgccaatcacctgtgagaccgcgccgcactatctggcgctgtgcgacgaggacctgctcgaatacggcacgctggcgaagatgaacccgcctctgcgatcggccgtggatcgtcaggcaacgattgccgcgatcgcggatggcacggtcgacctgctggccaccgatcacgcgccccacacgctggaggagaaggaacgcggcttcctggaggcgcccaacggcatcatcgggctggaatgcgcgtacggcgtgtgccacaaggtgctggtcgacgggggttacatctccgaccagcggctcatcgagctgatgagcgtcgcgccctcgcgcctgatgggccaccggccgaccgacgtcgccgcgctgctcaacgtcaccgccccctgcgcgtccaagcgcactctggacctgtccaccgtggagcacccggagaacgtcgacctcgccatcctcaacacgtccgaggcatggaccgtcgaccccgagaagttcctgtccaaggcccgcaacacgcccttcggcggatggcatgtcaccgggcgtccgctggcgaccatcatcggctccacgctggtattcagccgcattcactgacggcagattcgaaccggcccgcaaacccgccgtcagcggcgggacagacacatgaaaggaagtaccacgcatggatcgtttgatcgaagccattgaggaggcacagaaccccagcatcgtaggactcgatccgacgcctgcgctggtcccgccgcaggtcgtggattcgttcaccgacgaggtgcgggaatccatcgaggatgagtccgaattgcccgcggcacgtctggccgtagcgtatttcgaattcaaccgggcgatcatcgatgcggtcgccgacatcgtgcccgcggtcaagccgcagatcgccatgtatgaggcgatcggcccggccggggtcgacacatacacgatgacctgcgaatacgcccagcagcagggcctgtacgtgctcggcgacatcaagcgcggcgacatcggatccacggccgccgcatacgccggtcatctgtccggagtcaccgacggcgacggcctgtatgacccctggcacgaggatgccgtcaccgtcaacccttatctcggcacggatggcatcacgccgttcgtcgaggcagccacggcgcacgacaaggacatcttcgttcttgtacggacgtccaacccttccagctccgaattgcaggagctggagcttgccggcggcgagaagctgtacgaacgtacagcggacctggtggagggctggggcgccgacaccatcggacgccacgggtattcgcacgtcggcgcggtcgtcggcgcgacccatccgcaggagggcaaggcgcttagggcccggatgccccacactttcttcctcgtgccggggtacggtgcgcagggaggcaaggcgggcgacgtcgccgggatgttcgacgccgacggctccggtgccatcgtgaactcctcgcgcggcatcatcggcgcatggcgcaagagcgaggaataccgcgaggacatgagcgccgacgacgcgctcgacctggtggcgcgctgcgcccgcaaggccgcgcaggacatgcgcgacgacctgcgcgtcaacgtgtaccgctgaggcggtgaaccgcatgcggtgattcggcttcgggagacgccgccgaatcaccgcatttcgttgcgccacgagcgcgtcacggcatcgtcatgccgtaatcttgaactgatggtcacatggatggaggagtgtatgccagcagccaccttcacgccggtcgatgatgtcgtaagccaagcgacttccgccggtttcttccccggacgacatgccgtcgacgtcaccgatgtgcgcaggctgtcggacggcgtattccgcctgacgttccgcgacggatacatcgccgcccacgccaaggcggcgcagttcgtcaacctgttcagccatgacagcatgatgctgatgccgcgtccgttcggggtgagtgaggtgcgcgacgatctggtcagcgtcatcttcgccgtcgtcggcaaggggacgcaggagttctcgcgtcttcatgccggggaccggatcgacgtgctcggcccgctcggccgcccgttcaacacgaaacgcgacgcacactatctgctggtcggcggaggcctgggcgtgccgccgctgatctatgccgcgcaacggttgcaggcgtcggaaaagtcacactcgaccgcggtgttcggctacaggaacgtgcatttcgccgatgagatcgtgagctcttacgcacaccgcacgctgagcatcgacgagtcggaaggcaacgtcatcacgttgctcgaccgcatggaatcacaaggagaactggcggccggcggcctggagccggtcgtgctgtcgtgcggcccgctgccgatgatgaaggcggtggccctgtggacgaccgcgcggggcatcgaatgccagctcagcatggagcagcgcatgggatgcggatacggcacatgcgtgacctgcgtggtcgatacggtcgccgggcgcagcaaggtgtgctctgacggaccggtgttcaccgcccagcagctcggatgggaggcgtgaccatggatgccgtcaccgacacgaacgtatatgagccgcaccagtggaagcattcgaccatcgtcgccggcgtcgaatggaagaaccccgtcggcaccgcgtccgggacgttccagctcgcggcatgccgttggttctatgacgtgagccagatgggcgccatctgcaccaagggtgtgtccccagagccatggcagggcaatcccggcccgcgcacggcggagacccccgccggcatggtgaactccgtggggttgcagaatcccggcgtggatcattatctggtggacgagctgcccaagctcaaggacctcggagccacggtcatcaccaatgtcgccgggcatagcgacgacgagtacgccgaagtcgtggcgaaactggccgactcgcgcgccgacatgctggagatcaacgtcagctgccccaacgtcaatcacggcggcatgagcgtcggaaccgacccggaggcgctgcaccgcctgatcgaccgcctgcgcaagatcacctcaaagccgatgatcgtgaaactgtcgcccaacgtcaccgacatcacgacgatcgcacgggccgcggtggatgccggcgccgacgcgctgagcctcatcaacacgctggtcggcatgcgcatcgacatccgcaccggcgaaccgatcctctcgaaccgcacgggcggcgtgtccggcccggcgatcttcccaatcgcgctgagctacgtgtggcgcgtgcgtcaggcgctgcccgacattccgatcatcggcatcggcggcatcgactcgggggagaaggcactggaatacctgtatgcgggcgcgaacgccgtcgaggtcggcgcggctgccctgtacgatccgacggcaccactgcgcgtggcccgcgagctcgacgacctgttggattcaaggcccgaacttgcggcgaagctcgcagcgggggagacttggagataaccatcaattgaggagggtattgtgaccatcgcaactcttgaccatcgcttcaccgaattcctgctggaatcgaacgcgctgaagttcggcgacttcaccctgaaatcagggcgtcaatcgccgtatttcatcaacgccggcgcgttcaatgacggtcgcaagatcgccacgctgggtgcgttctacgccgagaagatcgccgaggagatcaaggccgggcgtcttccgcacgacatcgacacggtgttcggcccggcttataagggcattccgctggccgtatccaccgcgatcgcgctgacctccggccacggcatgcaggtcggctacacgttcgaccgcaaggagaaaaaggaccacggcgacggtggcatgatggtcggcacgcagctggccgacggcatgaaggtgctgctcgtcgacgacgtgatgaccgcaggaaccgcggtgcgcgaggtcatccccaagctcaaggccgaggccgacgtcgatatcgtcggtctggtgttgagcgtcgaccgtatggagaagacgaaggactccgacctgtccgcggtggccgcggtcgagaaggaattcggattccccgtgctcgccatcgccaatgtgcgcgagatcttcgaggccgggcgcaacatcgtcacgtccgacggccagccgtacgtgaccgacgccatcaagagcgcggccgacgactatctcgaacgctacggcgcctgattcgtatccggcgctgacgggctgcggcattgcatttgccgtagcccgttttcttatgggcgtgtcgccgttttacttcaagtacttgaggtttttagagttgacgatatgagcacaacaaccgcatggcatacgattcgcgaggcggcgatgatttccgggcttccggagtccacgctgcgctactacgagcagatcggcatcatcgctcccatcgcccgtgacccgagttcggggcatcgcgcctattcgaaaagctcatcgaagagaaccggaacatcatcgagcaggtgaagcgcctgcagcccgacgccaaacaatagccggcaaccgacagatattcacaacaaaggagtgattgacatgatcgaaatgatgaaggctgcgatattcgtggagcccggcaagatgaccgtcgaggaggtgccgaaggcgacgcttcggcaggacgacgacatcgtgattcgcgtggtgcgcacttgcgtgtgcggttccgatttgtggttcttccgtgggctgagcagacaggccgcacacagccaggtgggtcacgagtccatcggtgtggtcgaagaggttggcgcggcggtcgaatccgtcaagcccggcgacttcgtggttgtgccgttcccgtacagttgcggcaagtgcccggtgtgcaaggccggctttgaatccgtgtgcccgcacggcggctacttctccgcctgtcaggccgaatacctgcgcgtaccggaggcggacggcaccgtggtcaaggtgcccggttcgtcggaagactacgatgacgcgacgcttgcttcgctgctgaccatttccgatgtgatgtccaccggttatcacgcggcggcttctgccgatgtcaagcccggtgacaccgccgtggtcatgggcgatggcgcagttggcctgtgcggtgtgattgccgccaagatgcgcggtgccacgcgcattattgccatgagccgtcacgaggatcgcgcggcgctcgcccgcgaattcggtgcgactgatatcgtgcccgagcgcgatcaggccgccgtcgacaaggtgctggggatgaccggcggctatggtgccgacgctgtgctcgaatgcgtgggctccaagcagtccttcgacacggcgatcggtctgatccgtcgtggtggcgtgatcggccgcgtgggcctgccgcatgatgtggtaatcagcgccgaaggcacgttctacggcaacatcggcatcaagggcggcccggctcccgtgcgccactatgatcttgacgccggtctgctggacgcggtgcttgaggggaggatcaaccccggtcgcgtgttcaccgccgagtacgacctcgaccacatccaggacgcctatgaggccatggaccagcgcaaggtgattaaggcgctgattcgcctctaggcgaggcggttgtatcagcgaatcgttctcaataagaaacgtgcgaggattcctcacaaaacagcacaatcgaacatcaaggggatgcccggaattgcaacgttccgggcatccccttgttcgttttggcctcagcgacggctcgcacttttcttattgagaaccgttcgctgaacacccggcgcgcgtctattgcgccgtcgaggcgcccaccgaagcgagtcgctgattcacgcgggtctgaacctcgatatagtactgctgctcctcgggggtcagcgaattctcgtcgatggcgtcgagcttcttcatggcatcgttgtacttgaccattatcttcgcgtagtcggccgccatgctcgccgggtgcccgccggcgttgtacttctccatgaagtcggcgtactcgttcatcagcgactcgtagctgtccatcgcggccttgaaatcggcgtcggagctggatccggtggaagcgtcgccggaacccgaatcatcgttgttttgcgtggcgccgttcccggacgtgctggaagtcgaagagtcgtccggggcgaggatgagaatggccatgatggagtcgcccttggaatcgtatctgatattgaccgagtagccggcggcgttcttcgcgttgaacgcggaggagctcttgaagtagtcgacggtgaatcccttctcctgcagagccttgacatagttgtcgtacgctgtggcatcggtgccgcacaccttgatgtagaacgcgctcgagctatccttctcgatcttacccttggaggattccggcttgggcagctgactggccaggtcggtcgtcggccatgagtaggcatcgcatttggccttcgcggcttccttcgcggcctgttccgcggcgtcatgagaggccttggcctcgaggccgttgcgtacgacatccacgccgccgacgatcagcgccaccacggtgataccgaccgcgacccaggcgagcacgcgcccctgcgccttgccgtccttgcgggttgtgtagacggagaatccggacaacaataccggcaacagcgcgaagaatgccaacagaccccagctgttcacaccgatgaaggtgatcagcaggaacaccgcggcgacgatgatcgcgaacaccgccagcttggaggtcttcttgttacggacatcgggtgcgtcgggtgtattgggagtgctaggagtgccgggggcgatggggatgacgcccggcgtctgcggcggcacggtgttccccgcgggctggaccggcatgggctgagtgggctggacgggttgcggccccgatccttggggtggctgtggcgtgaaatcggatgggttcgtcatggtctgctctttctcttcaatcgcgcgtttatgcgcggacactggtgacatcgtccattgtcatgggcgatgcggcggcccgtcatcagttgccaactgaatttcggaaattttttccgcatggatgattccggcaccggagccgtgtcgcacgccgccgcgccatgtagtctggtcacagtgaaacgaacgggccagtcgattgacgctcccgacgggagatctcccggcggtccggcatgtgaagacataccaggggaaggcgaggcatgaacgtcaacgatccggcgcatctgaccgatgagctgccggaacgtctgctcgccagcgacgacatcgaaacgcaacggctgctgcgtctcgccggagtgtccgaactgtactgcaggcagcggcgctcggggggacgacgacgattatggacgaacggcagaccatgcacgccatgatgctcgacgacgcctactgcgtcgaacgggtgctggcggacggcgcatacggcgtcaccgaaatggtgagcctcgatggagccgggccgttcgtgcgcaagaagatgccgctgcggctggcgaggcggcgactgtggtccccacactcgccgaatgcgcttcgtcgcggtgccgcgcgtcgaggcgacctacgagctgcccgacatgttcgtggtcgtttacgactacgtggacggcgtgacgctcgaccattacgtcggcgagcgcgacgatgacaacggtgatggcgtctacggctcggatgtcgccatttcgctcatcctgcgcgacgagaaggggaacttcgtgttctggcgtagtgagtatgtgcgtaaaccggccaaaggcgaatcccgcgcgttctccatccagatctatggtctgcccaagtacgcctcctatgaggcgtacgcctatgcctcgtagatgtttctcctttggaagaggtacatttgtcttgttgcggagagctatctgcgttcaatgaagtgcctgaaacatgagaacccgagtatcaacgttgcaatgacggcgtttgcactcgagggttcccattcggtacctctctgaagacagtcagcattctgcaggaggtcgaatgtacctcttgcaacgaagatagatgcttgcaacggtccgaatatgtcccttgtcggccagttggcgtccctacaatgggggatgacgtgacgcgtcgtaggagacttgagtgaaggggtgcccaatatgcagcggatacgggacgatgcgcgcccggagtcgatcgaggtgcgcggcgcgcgcgtgcataacctcaagaacgtcgacgtcgacgtgcctctgggcgaactggtcggtgtggccggcgtctccggttcgggcaagagctcgctcgcactcggcgtgctgtatgccgaaggctcacggcgatatttggaggcgctgtccacgtacacgcgccgccgcctcactcaagcgagccgcgcgcaggtggacgaagtactgcacgtgcccgccgcgctggccctgcaccagcggcccgcggtgcccggcatacgctccaccttcggcacgatgaccgaattgctcaacagcctgcgtctgttgttctcacgtctcgcctcacatgtgtgcccgcattgcggcgcacgcaacgaaccgactctcaacgtggccgccggcctgcccatcgtctgcgcgaattgcggcaaggattttcacgcgcccggcgctgaatccttggccttcaactcggccggcgcatgcccggcctgcgccggcaccggcatcgtgcgcgaggtgaaccgcgcggcgctcgtacccgacgaatcgaaaagcatcgacgagggcgcggtgctgccatggggttcgttgatgtgggacctgatgaaacaggtcgccggcgcgatgggcgtgcgcaccgacgtgccgttcaaggacctcacccccaaagaacgcgacatcgtcttcaatggcccggccgtcaagaagcacatcctgtacaagccgaagaaaggcgacgacttcgccgaactcgacttcacgtatttcaacgccgtgtacaccgtcgagaacgcgctcgccaaagccaaggacgagaaggggctgaaacgcgtggcgcggttcctcgaggagaaaacctgcccggattgcggcggcacgaggctcagcgaggcggcgcgcgccccacgggtgcgcggactgaatctcgccgaggcgagcgcgatgaccttggacgcggcggtggactgggtgcgtggcgtgcccggatcgctcggggccgacatgcgcccgatggcgacgaacatctgcgaatccttcctcgatgtggcccgccggttgttggagcttggactcggctacctcgcgctcgatcgcgccggagcgaccctgtcgaccggcgaacgccagcgcgtgcaattggcccgcgccgtgcgcaaccgcaccaccggcgtgctctacgtgctcgacgaaccgtccatcggcctgcacccggcgaatgtggacggtctgctcggcgtgatgcgtgacctcgtggcggatggcaactccgtggtggtcgtcgaccatgatgtgcgtgtgctcaaggcatgcgatcatctcattgaaatgggtccggtcgccggtgccgaaggcgggcatgtgatcgcgcagggcacggtcggcgacgtggcggtgaatccacgcagccgcatcgcgccgttcctggccgatggcgaaagtgtccgtgaacgcgggtgcatgcccgtctcgcatatgttcgaccttgggcatattcgcatgacaaccagtcagctgcatacggtcaagccgctggatgttgatattccgcgcggccgtctggtggcggtgaccggcgtatccggctccggcaaaaccacgatggtgctcgaatcgttgattcccgcgctcaaggcacggtctgcgggggagaagccgtccgagcatgtgcgctcgatcgacgccgacggcatcgagcgtgcgaacctcatcgacgccacgccgatcggcgcgaacgtgcgttccaccgtggccacctacgccgacatccacgacgacctgcgccgcgccttcgcccgaagcgacgaagccaaggcgggcggttggaaggccggcgacttctcctacaacaccggcagactgcgctgccctacatgcgacggcaccggttcgatttcgctcgacgtgcagttcctgcccgacgtcgacatcgaatgccccgactgccggggctcccggtatgcgcccgaagccgactcgattcaccgcacgaccaaggacgggcgcgaactcaccctgccgcagctgatggcgatgagcgtggatcaggcgttggccgtgaccggcgacatgcgcaaggtgcatgcgcgactgaccacgctgcacgatctgggtctgggctacctgacgctcggcgagccgacgccggcgctttcgggcggtgaggcgcaacgcctgaagcttgccagcgaaatgggcagggctcagtcggacgccgtgttcgtgttcgacgagccgaccatcggcctgcatccgctcgatgtgcgggtgctgctcggcgtgtttgaccgactcgtggcgtccggcgcgaccgtcgtggtcatcgaacacgacctcgacgtgatcgccaacgccgactgggtgatcgacatggggccgggcggcggcgaaagcggcgggcgcatcgtcgccgccggcacgccggagcagatcgcggccgatgcgaacagcatcacgggccggtacctgaggtgactgtatccgtgggcgacccacatggcggtcatgcacggctgcgagggatgccgcgcgagtaggatgaccgtccgtggttcaggttcatggcatcagacgcgcgagcgcggacgcgaaataccggcagatgaccggtcagccggtcaaaccgttgattctcagactgtgtctgccggcggtgatctccaatctggtgaccaccgcctacaatttgaccgacacttttttcatagggcagctgggcaccgcgcaatccggcgcgatcggcatcgcgttctccatcatgaccgtgatgcaggcgctcggcttcttcttcggcaacggcgcgggcaactcgatgagccgcgaactcggcaaacagaacaacgagcgggcatcccggctgctggccgtaggcttcgcgggcgcagtgatctcaggtctgacgatcgccgcgatcgggctgctgacgttgcggccgctggtcgtcatgctgggttcgactcccacgattgcgccgtacgcggtgcaatacctgacgccattgttggtcgccgcgccctgcgtatgcgggtcgttcgcgctcaacgggctgctgcgctaccaaggccagtcggcgttcggcatgatcggcttggtttcgggcgcgctgctgaacttcttgctcgcgccgctgctcatcttcgtggcgggcctcgggatattcggcgccgggctggccaccgccatctgccagacggtgagcttcgcgattctgacgacgatgagcgccagattcggcgtgatgaaactgtcgttgcgcaactgccggccggatgtgctgctcatgcgcgaggtggccggcggcggcctgccctcgctgattcggcagggtgcgggctcgatctccgtgacctgcgtgaacatcgccgccaacccgttcggcgacgcggccatcgccggcatggccatcgtgatgcgcatcatgttgggcgccaactcggtgatcgtgggcctcggccagggcttccagccggtgtgcggatacaactacggcgccggcctgtacgcgcgcgtcaaggaagggtactggttctgcgtgcggctcgccaccggcgtgcttgtggcgttggccgcgctgctgtggatgttcgccccgcatctggtcgagatcttccgctccgacccggccgtggtggcggtgggtgtgtccgcattgcacattcaatgctgcacggtggtgttcaatggcttcaacatgatgggcaatatgatgacccagaccatgggccgcaccggcatcgcctcgttcctggcattgtgccggcagggcctgtttctggcgccgatcgtactggtgctgccgttggcgttcggcgtactcggcgtggaaatggcacagtcggtgtccgacgtgctcaccttcgcggtcaccattccattcatgcgccgcatcctacgcgaattgagctgattcgccgccccatgcgcaggcgatggcgacgacgtgtcggacggattcgataaaatgcattgtgcatacgttttcaacagcgtttcgtcgcggcatcgggcagtgatcgccggacagcgacgaaccgacgaaggcagggaggcatacgaatcatggaacggacgaacggcaaacgcatcgccatcgtgacgggcagcgccctcggactgggctatgaactcacgcgacagctcatcgaccgcggatggttcgtcgccggcatcgacttcaacgccgaacgccagaccgaactggccggcgaattcccccggggctcttaccgcgggttcgtcggcgacgtgtccgacgaggacttcgtcaaagcctcggtggccgagatcgccaagatcgggcacatcgacctgctgatcaacaatgccgggcagccctcattcaagacgccgaccgcctacgaggccgccgacgtggacaaatgcctcaaaggcctcaagggcatgattctgtggtgcgtccagacgctcaaggcatgcgacgaacagaacctcaaaatcgccaacgtgatgagcaccgccgctacgcgcggcaacgccaacgaatccgtgtactgcgccaccaaatggggtgagaaggggtatacacagagcctcaaggccgcgtacaaggggtcgagcgtcaccgtcgtgggcgtgtaccccggcggcatcgacaccgacttctaccgcgagagccacgactacgtctcactcgacaagcagcacacgttcatgcccgccgccgatctcgccggcgtggtgctcgacaacctgctcagcgaggcgcgcctcaccgtctccgacattctcatcgagcgcctgtaccgttgaccatggcatcggcgcgcggcaatggcaggcaatcccggcgcaggcccgcagccggcgacatcgagtcgctgtaccgcgcgctgtccgcggaactgagcccgaccggatggtggccggcggacaccacattcgagatcatggtgggcgcggtgctcacgcagaacaccgcgtggggcaatgtggatcgttcgctcgcggcgttgaaggcggagagcatgctcgacccccatgcgttgacggtcgtggagccggagcgtttgcaggagctgattcggccgtcgggcttctacgtcaacaaatccaagaccctgcgctcgttgagccgttggtatgtggagcgttgcgacgcctctcccgaaggagccgacggcatcaccgacgccgagctgcgcgccgaactgctcggattgttcggcatcggcggcgaaacggccgacgatatgatgctctacgtgttctcccgccgcacgttcgtggccgacacctacgcacggcgcctgttcgcgttcctcggcttcgatgcgcctgccggatacccggcgtttcataaggcgtatgcccccgtggtgctggacaccgggctggacgtcgccgaccttcaggaattccatgggctcatcgacgaggtcggcaaagcctaccgcgacgatgcggcaaaaaacgagtcgtttctccagtcgtggcgaccgggagaggctgctcctcgcccgacggagtgacgagacggcgccacgggtatgttgaaacgagttatgatggacaatcatgagcttgattgagatgatgattctggggttcctttcggagcgttccatgtgcggctacgagttgcgcaagaagatggagcagctgcaggggtacacgcgcaaattcagcgacggcgcgatttatccggcgaccaataggctcgtcgaagcgggattgatctccgaacaggcgtcgattcgcgacgggcgccagcgtcgcgtgttcaccctgctggacgcgggtcgcgccaagttgatcgacgagcttaaaagcaccagtggtttcaatctcaccgatttcacccggtggaccgtcgtgcttaccttcctgtccgtcgtgccagacaaaaccgaccgtgacgcggtgttgcgccgccgttacgaattgctcaacggccacgacgtgcatttcttctactgtgacgcgggcaatccgttgagcgccgagcagatcgacgacccgtaccgcaagggtatcatcaccgtgcatgacgcgcagatcgccgccgaactcaaatggctgcgttcgatgctggagatgtaaggggcaatgggtcaattcgctattatggttggccagttggtcggcttcttcatcatgctgatggtcggatacggatgcgtgaggcttcgcttctacggccagaccgcgctcgacggcatgtgctcgctgctgctcaacgtgcttatcccgttgctggtgttctcgaacgccatggcgggtgcggaccgcgcgcaggtcgaggccaattggggcgtcatgctgctgaccgcggtgatgtacgccctgcttatcctcgtgttccgcttggtcgcgtgggtgttgcggcttgagggatcgcgtagccacgtgttccaggcggcactgatcttcggcaacgccgggttcatcggcattccgatcatcatggcgttatggccgcacgagggtgcgatctacgtcgcgttgatgtcgatcgtcgatcagacgctgctatggacgtacggcgtatggctgtgcgagccggttcccgaacccggtaccgtcgcatcacccgacgccgccggccggcccacgctcggcctgcgcgtgcgcaatctgctggggaggttcgtcaaccccgcgttcatcggggttatgctcgccttggtgctgatcatgctcggcgtgaggattccctcgatcgtcctgactccgctgcgcaccatcggcggcatggccacgccgatgtcgttgatctacctgggcggcctgttcgcgctgaccaaatggtggggcgtgctgaaacgctacgaactgtacgtggggctggtcgccaagatgatcgccttcccgctgggcctgtacgcgctactcaccgcggccgccggcgcgctgccggagctgccgatcacccacgacatgatcatgatgatcacgttggtggccggtctgccgaccatgaccaccatcgccatgttcaccgcccgcaggaacaacatgcccgactacgcggtcggcttcgtgctcgtaagcacgctgttctcgctgctttcactgaccatcgtgtcggcggtggtgttctgacgagcgcgagcgacaggccttcgattcaacgcaacgcgtcgtattcggcctcgaccgactccagccactcgttcgaggcaccgtccaccgcgttcatgatggcgatatgcgcgaagtcggaatccggcgcggccccatgccagtgcttggtctccggcgccacgtacaccacgtcgccggggttgagctcaactggctccttgccccactcttggtagtagccgcgcccgcccacggcggtgagaatctgacaggccttgtgatggatatgccagttgttgcggcagcccgcctcgaatgtgacgttggaaacgttgacttccttgcccgagaccagcggtgccagatagctctgcccgatgaaatacttggcgtatgcgtcttcccgatgcacggccgcatccgcaccacgcccgccgcgacgccctgctcgacgaacgtttccgctgaatcgacttccggtgaggtcgggtccgctcgaaggtgttcggtccaccttcagttgcgtacggtaaaaccggcatccgcgatgcgttcgcgcatgttccgcgcaatcgatatgcaccgggttcgtgggatgccggctttcatgccgatgtctgccatgtcctcaacggtgatgccgcgccccttaccattgaccgcagtggtgtgttcgccgttgataccgggattctcggtaaggtcgtacgcgggggagaggctccaagcgccggactccgcatcatgcaggtaggagaagttcttcgcgtggtcgtcgcgattgccgatgaacacattgaaacacatgagtcgatacaatcgttcgcattccttgatgccgccggtcatgcgcatggtcaatcgcatcagcaaggcgtagtccagattggcgatgcggtgtgaagtctccaacaggccgccggcggaaaccatgtgcaccttgccgatttcgccgttcgtgagcggtatgcggtcaaagcgcttgacgccaaaatagcctgcgcatcgacgtgaagggaacaacctggtttccggcatgtcgattccgcaagtgcgtgcaagattcgatatgtggtattccatctcgccgatatcgggtgcgtccacggatgaggggaacttgatgatccattcctcgccattgattgtggtgaggattttcgggcgggctccgcctgacgaaccgccaagaacaaacagctggtcgaggtcattcgagaagtcggcgctcaacacattcaggcattcctcggcgagtgagtcgagatcggggaatgattgcatgtcatcgtcgattgttgaagcgggttcgtattccagtgcgcccatgccgccatgacctacgatcgatagacgcgccagcgggccgaccgaatacgggtcgatgccatgttgacgcagcattcggtcggtcagcagtcgtccccatccgtcgggcatgctgtcgtcgaacacgccgaacatgccgttcagcggatctctttgggcgacgaacacgccatctctgagcggaaggcttatcgggctgatggaaaaaccgtgcgtcagccaggtcttgtcgtaggcgaacgccagtgtgcgggaaggtgacatggtaagcattccgacggtattgcctgcgagcagcacgcgcacgcggtctacatccagcagcggggtcatccgatgtcctttccgtggcgcgtcgctgtgaccacgtcatcgatcgagcggtaatacggctgggagaacagtgcgtcgaaatcccgttcgcagtccaaggcgaaggcgatgccgaccagtgcgttcagtgatatctcatggagttgttcgaatcgacgaatcgacccgagactcacccctgattttcgggcgagatcggactgcgtcatgccgtgttccttgcgtctcatggtcattcgccgggcgataccggccattacttctccgggaagcggctcatctaacaaatcatacatactaatattttagcaatacttatgaaattatatagtaattactactatattagtagcattcattatgtcgtgtcagtcctatccggcgcttgtaggtggcctttgccagaggacggcggcggcgtcaagcgcatgctggatatcggctgcgggccgggcaacagcacggccgtgctgcgcgaacgctacccgcacgccgagattctcggcgtcgacagctcgccggacatgatcgaggcggctcgcaaggcctacccggacatcgatttccagctgtgcgacgtgtcgacgcatcggtggagttcgtgacgttcatcgacgcgatgctctcgctcgtggtcacgcaggacgttctgccggaggccgagggcgcgcaacatgccgcacaatcctccgggctgctcggcatcggactcggagcgttgaccatgatcatcggattgtggatgctgctgcgtcggcgctgggccgctgtggattcggtgctcgattccgagcaatagcggcgcattggccggcaatggccgactgcaggaggggcagaggtcccgttttccgatgtgtacgaacgtacatatacgagggggacagcatggaacccgcatgaatgctatgattgccgatatgccatcccagtcatcccgagtcgaccccgagcgacagcagcacatcatcgacgccgcgctgcgcgtcatcgcgtcacgtggagtggcaggcacctcgcatcgcgtcgtcgccgccgaggcgcacgtgcccctcggctccatgacatactatttcgacggcatgcacgatctgctgcaccaggcgttcgaccagttcgcccgggcctccgtactgaaattcgccgcgcgcatgcagcccgcctcgaccgtcgacgaagcctgcgacgccatcgcgctgagcatcgaacgagacatgctcggtaaccagcgcgacctgaacatcaaccttgagttctacacgctcgccgcgcgcgacctgtccttccgcgacatcagtgaccgctggatgtcggcgacacagaaggtcatgggccggttcttcgactccgagaccacggtgctgctcgacgcgatgatcgaaggcctgacactgcaccgggcgctgggcggggaaccacgcaacccccagtccatccgcgacggcatccggcgcatcatcgaccaccggcgctgacggcaacgggagtgcgccaaaatgcgccatccactgatggatcacataattcaggaacacggacctgtaatgggaaacagggtaaatcaacgccgtttgcccataacagtgaaggtcttcttgggaagaaggatccatgaccaatccgaacgcgccgtatgccgcccagccgcagcaatccggatttcaaccgcagccccagttccagccgcaacagccctatgctccccggccggtcgcacccctgcgtacgcagcgcggactgctgaaatacgtgctgctcggtctcgtcacgttcagcatctacgacatctggcagatgagcgaagtgggagacagcctgaacctgctcgcgttcaaacgcgacggcaaacacacaatgcactactgcctgatgttcttcctggtgggatgggtcacgctgggcatcggctggctggtgtggtatcaccgcgtatccggccgcatcggcgaagaacaggccgcgcgcggtctgcccgtcacggtcaccgcctcgacattctggctgtggggcatcctcgactcgctcatcgcagtgggaccgttcatctataattacaagctgctgcacgcgatgaatgacctgtccgcggactacaacgtgcgcggcttctgaacgagacacggatcgaaatcgggctccccgccacagggagcccataatcgcattcagtcaatcagcttgtaaccgtggtcggcaaccacggacttgagcttctcgatatacgtctcggcggccttcgacagtttggcgcgctcattggtgacccagcccaccagcatcgtttcgtcggtgtccaacggcacggtgacgatcttctcgttgttcaggtcgccgttgtcgatgccggtgcacaccgtgtacccgttcaggccgatgatgaagttcaggatcgtcgcacgatcggtcacgttgatctgcttgggggagtactccggccacacggcctcctcggcgaagaagaagctgccctcctcgccctgctcgtactggatgaacgggaacggcttgaggtcgtccatcgtgaccttcttcttgccggcgagcgggttgttgcgcgagatgaacacgtgcagcggcgcacggaacagcggatggaactccagatgcttctcgcgcagcatcttgccgatcacgtccttgttgaagtccgacaggtagatgatgccgatctccgaaagcatgttcgcgacctggttgatgatgtccttcgtgcgggtctcacgaatcgtgaactcgtactcgtcggacttgatggagtcgatcatctcgacgaacgcctcgacggcgaacatgtagtgctgcgtggacacggagcacagctgcttgcgcggcttcgcgttcttgtagcgctcctcaagcaggtcggcctggtcgagcacctgacgggcgtaagtgaggaattcggcgccgtccaccgtcagggcgatgccctgcgaggaacgagtgaagatctcgatgccgagctcgttctccagttccttgaccgacgagctcaacgccggctgggagacgtacagttcatgcgacgcctcgttcatggatccgcactcgacgatcttcacgatgtatttcagctgcagcagtgtcataagcagcatttataaggccgaccatggacgaaaccattgaaatcattgggattgccggcatttcaccaggtgcgggggtataagctcaatttatcatgcggcgggcttgcggtgcggtatgcgcaaggcacgctctcaaaactcgcagatacaccggacgactgacgttttttgccccatatctgcgagttttgagagcaccgaatccggttattcctacagcctcacaccgagcgaagcgagcgattcgcgggcctggagagcattgtcgaacagaagaccgtggataccgacctcgttggccccgacgatgttcttcgccgtgtcgtcgaagaacacgcaatgcccggcttcaaggccgaatcgttgcagtgcgagctcgtagatgtcggcgttcggcttgtgcatcttctcgatgccggagaccacggtgtcctgcagcagttcgccaatctgcgggaatttctcgaacgcgatgtgaatcgtctcatgagaccagttcgtcagtccccacacaccgtacccatgccgcttcaggtcgcgcagcagatcttccatgccgggcagcatgcgcggcagggcgtcgccgtaatgttcgatgtagtaggcgaagatcggagcgatgtcctcgccctgctcccgcaccacgtcggggtagatgtgagagaagtcctcgccggcgtccatgcggtcctcatagcggaagaacccgtgcgggtcgtcgggcgcgcatatcgcgtccaccgtgtcctgggggaaatgcccggtcaggcatgcgcgggtctgccagtccagcaggacgccacagaaatcgaaaatcacatcggtgatgggggagttgctcatgatgctcctcaacgttggaatagggggaataggatagtgtctgatttgttgatccggacggaataggtctccggccggcgcagtcgcgcaaacggtcgggatgcatcgacgccgggtatcatgcgataccggcctccgcatcccgaccgccctcgcgcccttacgacagcagttccgcgaaagtcgcgggaatcatgccgatcacatcggatgcgacgatgggatgccccagcttggtgcgcagatgacggtcatcggaaccgtaaatcgtcgggggcgtgaacccgcgctgatccgactgcgacgcctgagcggctgcatatccgtgcaggtaggcagcgcaggcggcgacatcgggagccgaaacgtcctcgtcgtcctgttgggcgagcaacgcccccagcatgccggcgagcacatcgcccgcccccgcggtgcccagccacgccggggcgctgccggagacgaccacacgcacatgctgctcatcatccgcgaatccaccctgcgcatccgactcccgatcggtgtcggccggctcgcccacgacaatcgtgaccgcgcctttgagcagcacggtggcaccggtgagctcatgggcccgcaacgcccaatgcaatggctcgttctgcacatccgacgcatccacatcctcgcccctggcggtgagcagcgaggcgagctccccggcgtgcggggtgatgacgacctgcggcggcacctcgtcgggcagcaggtcgagagcgcccgcgtcgaccaccagcgggggcatatcataggcgaggtcatcatcgtcatccgggtcatcgtcagaggacaacgcataatgcgtcagaagcttggcgatggtctcacgctggaaatcatcatcctcggtctcacccgtcggaacgccggagcccacgacccaggcctgcacgcgccccttgccgagtacggcctccgggaccgcggcgagcaccatatcacggcacacctgcggacccatgtagcggatcatgccgatgtttgtcttggccgcggccttgcacgacagcaccgcggcgccggggtatcgttcggagccggtgatcagaccggtcacgccacgtaagtacttcgtgtctgcaagccgggggagtcggacggtctcagccgcgttgtcgccggaaaccgcctcgacgaacggcatatggccgtcgatgtcgaaactgaagtccaccagcgtcacgcgaccgcaggcgtacgccgcgggaggcagcataaggcacggcttcagggcgccgaacgtgaccgtgacatcggcagggatatacgggcctgtgatggcaccgtcgtcgactcccacgccggaggggacgtccaccgcgacgaccaacgggaactcgccggtcgagtcgccggcgggaagggcggtgcggtcggggatcgtgccgtcgacgcccagcgaggatgcgaccgtgcccgcgatgccgtgcagcgccccgctcaggccgatgcccgtcatcgcgtcgatgatgacatgcgcgtgctgggcgagttccaccgcggcccgaagcctttcaccggcctctccagcgctgaagccggcagcgcaccccggaatctcggaggccgggtcgaggatcagcaccttgccgccggcgcggacgaatgcggcgaagccctcgccatgcagcgtgcggccgaccgcgacggcggtgaccgaagcgccgttgctcgccagcatcgtcgcggcgaacagcccgtcgccgccgttgtcgccgctgccggcgagcagcacaatgttcgactcctccaacgcgacgccctcatcttcgatcatttcggcgacgacatgggctgtggcggcggaagccatcctcatcagggggacaccgttctcaagcagtggccgttccatctcccgcacgtctcgcgccgtgaaggcggcgtgacgaagaacgtggagcctgttctcatctgtctgccctggcatgatgcatcctccttggttcatggatcgtttccatcaatcggactttgcccgtccctccactctactcgctgtcaagccgtcgcggcgacgcgtctgcgataccgttacacgagttcgcgcgcgcgagcggtacgagcactcgcggcggacggctggaccgtggtggctctcgcgtgacggctgcggcggcgacacgcggaagtgtcgccgccgctgtacttcaagcgctcgaagcggctaccgtgacatctcaaagcgagtcataatgaccgccgatcgcagtcaaaccgcaaggagatatcatgttcgatgagctgaaaagccgcatgaacaagttctggaacgatgacaggacgctggcacagacagacccggaattcgtcgagctgttctcgaacttcgcttatgacgaggtcgtcaacgagccgggagcgaatcaccccgatctgaacgactccacacgctccatggccattctggcggcgttgatcggatgccagggtctcgacgacttcgagctgatggtgccggtcgcgttcgaatccggcgtcggtgccgtccaggtcaaggaaatcgtctaccaggcggttgcatatctcggtttcggccgtgtactgccgttcctgaagaagaccaatgagatactggaggcgaagaacatccacctcccgctcgaaccgcaatccaccacgacgcccgaaacccgcgctgaggcgggcgagcaggcgcagatcgacatcttcggcgagcgcatgcgaggcttcgcgcaatcagggccggagaagacccgtcacatcaacaagtggctggccggcaactgcttcggcgactattacacgcgcggcgggctcgacacgcgccgacgcgagatgatcacgctgtgcttcctggccgcgcagggagggtgcgagccgcagctcacctcccatgcggcggccaacatgcgcgtgggcaacgacgagaggttcctgatcgccgtcgtctcccagtgcacgccgtatatcggttatccgcgcacgctcaacgcgttgcggtgcatcgccgacgcggcggcgaaggcgtgacagtcggcgcgggccgtcaggcttcctcgtgccagtgcgggttctacgcgaaggaacgtccctcgggattgtccatcgcggcgatgcgcacgatcgtcggatccttaagcatctggttggcgtggcccaatgggctccacgcctcggtgatgatgccatgcgcctgatcgtaggcgcgctgcccggcctgctggaagaaggggtacagctctacttggttgacggccggcgtgactccggtggagcggatcagcaagtcgatatgacccggcaggaagttgctgacgccgatgtgcttgacgatgccctgcttctgcgcgtcgacgagcgcctgccacgcctcgacgaactggccctgcgacgggttgggccaatgaatcagatacaggtcgatgtagtcgagtcccatgcgggccacggactcctcgatcgtgacgcgtgcctgatcgtactggtgatgacgacccggcagcttcgacgcgacgatgatgtcctctcgcggcacctctgattcgcggatagccttgccgaccacgccctcgttcggacatctatctgcgtttcgaggggttggtgcctgagtagagccgggccggaaaccgcatgattccaatgcgggatgtccccgcatactccggatatcgcgtttgggcaaccccttgaaacgcagatagatgttccgagagcgcgaaatcaacccctcgaagcggagataccgggtatcagcctgccagcggaggcaatgaggcacggtaaaaacgggttataggccagaatgtgtgtccgggataagccgtcacgtcttgtgctgactggtgcgtcgccgggttgaatgtgggtgccgggaccttcggggccggcaggcggctgcgccgtatcgcggtggcgctcatgcgcgtcgggggcggttcatcgcggaacacgtggtggaaccgtgttcgtgaagttcatgtcccccaagtatgacaaagcgggattccagcgacttgtaatcgttgggatcccgccattcttgtcgggccggcgggatttgaacccgcgaccccttgacccccagtcaagtgcgctaccaaactgcgctacggcccgaacagtgcgaaaagcaccgagaagagaatttaccatatgacgtcaataacgcaaaacaagcgtgtcgcgactcgggtaattcccgactatcacctcgcaatagggagacaccagctacatagacggcatggcccatccaagtcttatccaagttccatctgcgcataccattgcagtgcggcagccagccgccccaccccggatacccccgtaatggatacgtctgcgggatgattggcgaacgaagcaccacgcgagtagactataggaatgtttgccgaagatctgaaacggacggagaagatgacagtggacgatgtgttcgagcagtcggcgcagaagatgcgcgagcagggcatgagcgagatcgccatctcgcagttcaggcacgcataccatgtgtgggccagcgagaaggagagcgcgtggatccgcgaggacgccgtcgagccgctgcgcggcgtacggagcttccatgacgtgtacaagaccatcgatcatgacaaggcagtgcacgcgttcgccaagaccgcattcctcaagctcaacggcggcctgggaacctcgatgggcctgcaatgcgcgaagtcgctgctgccggtgcgccgccacaaggctcggcagatgcgcttcctcgacatcatcctcggtcaggtgctcaccgcgcgcacgaggctgaacgtgcctctgccggtcacgttcatgaactcgttccgcacttcggatgacacgatgaaggcactgcgacaccagcgcaagttcaagcagaccgacatccctctggagatcatccagcatcaggagccgaagatcgacgcggccaccggagcgccggcgtcttggccggccaacccagatctggagtggtgcccgcccggccacggcgacctgttctcgacgctgcgggagtccggcctgctggacactctgctggagcatggcttcgaatacctgttcatctcgaactccgacaatctgggggcgcgcccgtctcgcacgctcgcccagtatttcgaggacacgggcgccccgttcatggtcgaggtcgccaatcgcacgtacgcggaccgcaagggtggccatatcgtgcgcgacacggccaccggccgactgatcctgcgggagatgtcgcaggtgcatcccgacgacaaggacgcggcccaagacatcgccaagcacccgtatttcaacacgaacaacatctgggtgcgcatcgacgtgctgcgcgacatgctcgccgagcatgacggcgtgctgccgcttcccgtcatcatcaacaacaagaccgtcgacccgaccgacccccagtccccggcggtggtccagctggagaccgcgatgggcgcggcgatcggcctgttcgaaggcgcgatctgtgtgcaggtggaccgcatgcggttcttgccggtgaagacgaccaacgacctgttcattatgcgttccgatcggttccaccttacggactcgtatgagatggaggacggcagctacattttcccgaacgtcgacctcgatccgcggtactacaagaacatcgaggacttcaacgaacggttcccctacaacgtgccgtcgctcgccgccgcgaactcggtcagcatcaagggagactggacattcggacgtgacgtcatcatgttcgccgacgcgcgtctggaggatagaaacgagcccagttacgtacccaacggcgaatacgtcggaccgatgggcatcgagcccggtgattgggtgtgatgtgtccgccgtacgaagaaaaaatacctatttttgacaaaatgcgagccgcacacaacaaaaccctctatcatgggatgtggtgtgcgtgatacccatgcatatttaattggaatgctaacgatacgtgaggactaatggcagagggatcgaacgggagacgccgcttttccgacaaatggggcaaacatgagttggatgtgttggccgtgctgtcgtctgcgtttccgcagtggctgacctcgcggcaaatcgcccagcgcgtcaaggcatatgccgactcctacggggaacttgccgatcaggccgcgaaggccgcgttcgccaagcagttccagcgcgaccgcgccaagctcgcggcaatgggaatcgccattgagtcacgccagcctgaatactcctcgaagtccgagggacaggacttcgcgtcgtaccgactgcagctcggggacgagccgcgcatccgcctgcgcttcgagcaggaggatctgccggttctcgccgcggccaactatctcgcacgttcgatttccgtatcgtccacgcaatcgcagaccgtgacgccgcagcatgtgtcccgcaccacgccaagggtgccgcagacgcccatccccggcctcggattggattccatcgccccgggactcggcacgcagacgattccgccggctctcgtgcgcgtcgtcgactcccgccgtttcgcggcgacggtcgacgtggacggagagaacatcaacgtcgcctacaccgattccgacgacctcgccatgttcgtgctcgaacatcccggcgcagtgatcgtcagcccgcaggaggccgtcgacgccttcaaccgtcgtctccaggcggcgccaaacatggcgctggccgacagatcgtcggacgataccggcagcgccacggtcgccacgcccaccatcaccagcacgacccccgagccggaggacgccgaccccaagaaaaaccaccagaagaagtccgggacctcgttccagaccggcagtgaggtcgaccgcagactgcgtctgatgctcttcctgtccgcccacctcggtgaggaattctccctcgcggaactcgcggaacgcttcatcggcaggcccaagtcggatgacgagctcaagaaatacgtcaacgtgatccacaaagacatcaacacgctgaccacggtctccgacgacggcgagatggccggaagccagttcttcgacatcgattggtcgctgcttgacgccgaaggcatcgtgtccgcgacgaattcgctcggactggaacgcctcgccggcatctccccgcaatacctgagcatgctcaccgcttcggtgagctacctcgcgcattcgccgctgctgccggaggcgcagcgcacgcaggcggcctcgctgtatcagcgtctgcgccagctggtcaagccgggggagaccccttggctgagcctgaccggctacgagctggagccccactgcttctccgtcgtcaagcgcgcgatctccaccgaatcgctgctcgacatggagtacacggacggcgcgggacggacccgccgcaaggtcgtcgccccctccaagatcttcgtggatgagggcgtctactatgccgccgtctggaccgacgtgctggactccactccggaggaccggcgcaagttcgtctcacgcgaccagctcatcaacaaggcgaacggcaagccccgcacatggcaggtgctcaggctcgcccgcatcgagcacgccgaggtcatcgctccggtcaagcgcgtggacattcccgacatgccggtgagtgagttgcgcaagtggagcttcgacaacggcactccggccgtgttcatcacggatcagccggatcttccgttcatcaagtcgatgccgggagccaccgtcgagccgtgcagcccgggcgagaaggtgcatatcatcgtgtcgtccgattcctggttcgtcgccttctgcatcgcccatgcgcgtcacatcaccgcggtcgcacccgagaccctgcgcacgatgatcgtcgcccgtgcgcagcgcgagctcagcctcggcacacgtgaagaagacaccccggaagaggagtgatctcatgccctggtggatctggctcattctctcgctgttcatgctggcgatgatcgtggcgggcatcgcgtacgccgcccttcacggcttcagggcgttgaacggcattgcggagatcggcagccgtctcggcaagcccctctccgagctcgcggacgttccgcagggtgcggacgtgcgcgagccgctcgcccctccgacattcacccaaccgttgaacagcgccatcagccggtatgacgatgcgcaggtcgacgtcatcaggcaccggaacgcgaagcgcgaacgtcacgcgcgtgcgtgggcgcggtggtcacgtttcaaccgttgacggactgcggctgcaagctgcggcgcggcccgcggcatcgtctcatgcacgcaggcgaatacgagaatccgacggcgatggccgtctgtgacgaacggggtttcacgcatggtcaaacatcagcgcaatcattcggcggcggatcgacccggcccatcgccttcccagcggtatgccgcattccagaagcgtcaggcgcataacgcgagcgtcgccgcgcgtttcgcagccacgctgccgttcgacctggacgatttccagcaggacgcgatagacgcgttggagcggggggagaacgtgctcgtcgcggccccgacgggcgcaggcaagaccgtggtggccgacttcgcgatgtatctggcccgcgagcgcaatgtcaaggcgttctataccacgccgatcaaggcgttgagcaaccagaagtaccatgacctgaccgccgtttacggcgccgaccgcgtcgggctgctgacgggcgacatctcgatcaactccgaggccgacatcgtcgtcatgacgaccgaggtactgcgcaacatgctctacgagcattcgaccacgctcaacgcgctgcggttcgtcatactcgacgaggtccattacctcgccgaccggttccgcggcccggtctgggaggaggtcatcatccatcttccccggcaggtcagcgtcatcggattgtccgccacggtctccaatgtcgaggatttctcgtcctggatatcctccgtccgcggcgacactaagctggtggtctccgagcgccgtcccgtcccgctggagcagcatgtgctcgtgcaggccgacgaccacaccgagccggagctgctcgacctgtaccggcgtgacgcccagggcgagcagaccaccaagctcaacgcgcgcctgatcgaccggctcgatcagcttgaccgtcaggcggcgcgccgccgcggcgccgagaactcacgctcccgcggccgtggccattcgcggggccacgcgccggcgcagcgccacacgcccaagcgctgggcggtggtcgacgagctcaactatctcgacatgcttcccggcatctatttcatattctcgcgcaacggctgcgatcaggccgtcgagcagtgcatcaatgcggggctggaactcaccaccgaggacgagatgcggcgcatccgcgccatcgtcgacgagatggtcgccgggcagttgagccaggaggatctcaaggcgttgcagttctcccggttcaggttcgcgctggaggagggcttcgcgtcccatcacgccggcatggtcgcgctgttccggcagatagtcgaacgcctgtttgaagagggactggtaaagatggtcttcgcgacggagacgctcgcgctgggcatcaacatgcctgcgcgctgcgtcatcgtcgaaaagctggagaagttcaacggcagcgggcatgtgccgctgacaccgggggagttcacccagctgaccggccgcgccggccgtcgcggcatcgatacgatcggacacgcgatcgtcgtcgaccatcgcgatttcgtacctgcgaccgccgccgcattgtccagcaagcgcgtctacccgctgcattcgagcttccatgccacgttcaacatggccgtcaatctgctcaacaccagcgactacgagacgactcgcgccacgctggaccattccttcgcccagtgggaggccaacgagtcggcctggcagctcgaatcgcaactgaccacgctgaaacaggcgttggacggctatgagcaggcattccactgcgagtacggggatttcgcgtctctgatgcgcatccgcatggagctgtccgacctggagaagaacggccggcgcaagctcaagcagaccgccttcccgaccgacgagcagcgcaagaacacgttccgcgagctggaccagtctatcgagaccctgaagaagcgcgaccgcgaacatccgtgccggcagtgccccgacatgcagcagcatatgaaatggggtcatcgctggattcgcgagatgcgcgaatacgagcgggtgcagcacaggtacgagtcgcgcaccggatccgtggcccggcagttcgaccgtatctgctccatcctggaacagctgggatacgtgaagcgcgacgggacggacatgcgattgagcgagcaggggcaactgctgcgccacatctacagcgagcaggacatcgtgcttgccgaagcgctggaacgcggcatgttcgaccatctgacggcgcgacagctcgccgcggtgctctccgccctggtgttcgaagccaggggaggcaccgggggagaaccgaggcgctggcccggcggcatccaaggcccggtcgcccagacttcgcaatctttggaccgtctgcatgcgcagctcacgatgctgtgcgaggatgaagggcttgacgacctgcagcaactcgacttcggcatcgtcgacatcatgtacgactgggccagcggcaacagtctggcatatgtgctgcatgaccgggacatgaccggcggcgatttcgtgcgcaacgcgaagcgtctgtccgacatcctccagcagatctcggcggcagagccgtatctgccgcaggggagcgcgcacctcgcccaggtcgcgcacgaggccatggaactggtcaaccgcggcatcgtcgcctattcgggcattggcgagggctgacggaatcgtcgcaggcggcaaggcaggaccggaacggggaatatacgactcgtccgaactgttttgtagcgtgataatagttttcgggaaagatcgacaagaaagaccacaaggaggaacgtcatggcggaacgcagcctacgcggtatgagcatcggcgcgaaatcactggaatccgacgacaacgtggacttcgccgcacgcagcgaagtggcgtacatctgtcccaagggacaccggaccatcctgccgttcgccgagggcgccgaaatccccgacgagtgggaatgccgctgcggcaccatcgcgcaccgcgagggcgacggcgacgaggaggccaacgagatcgccaagcccaccaggacccactgggacatgctgctggagcgtcgcagcgaggacgaactgaagaagctgctggacaagcgtcttgaaatgcaccacagcggctggattcccgactacgagtaaggggagaggcatgtctcagcatcaggtcacgacccggcagcgcaggaacgtggtgctgctcgaccttgacggtacgttgacgcaatcggacccgggcatcatcgcctgcgccaccaaggcgttcgaggagctcagcctgccggttcccgacgatcaggagatgcaccggttcatcggaccagccatcatcgaatcgttcagacgcaaccatatgccggacgagctgctggatcgcggcgtggagatataccgcgaatactatgcggacaaggcggtgttcgacgacccgaacaatcccggccacaaaattcccggacgactgtacaacagcgtgtacgccggtattcccgagcagctggcggcattgcgcgccgacggcttgcacctggcaatcgccacgtgcaagccgcaatatcaggccgagccagtgtgcgagcatttccatctcgataccatggtcgacggcatctacggcgccagcacagacaattcgcgcatcgacaaggaccaggtcatccgatactgcttcgacagcatcggattcgatgcggatgccggtgaccgcgccctgatggtcggcgaccgttggaccgacgtcgacggcgccatcgcatgcgggctcgattgcctgggttgccgttgggggtacgccgaagccggtgagcttgaggaacatggcgcataccgcatcatcgataccgtcgatgagcttgccgccgcggtgaatgattattttgcgaagtgaccatctgacataccgtactattatccgataatgtacgttatgtcagatttatgatcttcgggacaattgacgttccgcttttgcacttttatccggcgaaagtcccataatcacgtcttgaaataggactttcgccggataaagatatcttcgtgcagattttggctgtgtttttcaggtagatggcgatgaggatgagccggaggtcggcgaggaaggcctcgtcgagcctgtcgtactcgtgcgcgcggtccatgagcgggcgcgcgcccatgaacgcgttcgatgacttctcatgcatcatcaccagcaagcagacggtcaacatgccggtcgtagaggtcaagttcgacaacgacgacaacgaggtgcggggagacactttgttgggggaactgcccatcacgttccaaaccgacagctcgggatcatggaacatcgaattggacgcgacgaaactgacgccggatgctcttccccctgtgggaagcgtcgattacgtcaacgatatattctcgtctcacagacgcatgcgtcacgcctcggtatgcgtggcgccgcggaccacacggtcgacttcggtgaaatgcgcacgatgcgcctggatacccatcagcaacagctccacaaaaaccagcgcgatgactatcgccgcgccgatcaccaagtggtcggtgtagaaatcgtggaatgcgggggacagttcctcactcgccatgagatacaccatgaaggggatgcccgcgaacagcacggacaccatctgggccagcaccacattccagctgacggggttcacctcggggtgcctctcccccgtgccgaaccgacttctcacaatgcagatgccgcacaccgagagcatccacacgacggcgaacacccacaacaacagcggaagcagatcatccatacgccagcctccggttatgccgcctcgcgtgcggcacgctgggcggcaatcttcctgcgcatgcgcatggcggtaagctcgtcgatcggccgaccggcgacacgtcccgaccctgcggagccgacgttcgccgaggacgactgcagatcgacgtagtcctcggtctccagcgcgtcatgaatctgatgccacagcgagccgacggacacgccgaacacggccttgccgctctgcagcagtgcgatcatctggtcgctggtggtgcattcatgcacctcttccccatcgcacatgatggtgacatgctcaagctggtcgacatcgcgctgcatcaggaacccgatggccgtagtgacgttctgcaggttcacgcctgcatccagcagcttcttggacgccgcgagaatcaccacgtccttgaaggagtacagccgcctcgaccccgatccgtgagatggggtgatcgatggttcgacgatctgcttgcgcgcccaatagtccagctgacggtacgtgatgccggcgaccttggaagccaccgtaccacggtagccccgtgtcgggcggctggcgccttcgtcgacgaacagctccccctgcacggcgtcggacgcaccgagatcgagcctctgctccagcggcacgaccagatgcagcccggccgtctggctccctgtctgctcagccatcgcactcccccgtcctgtgcatgcgccgaaccggcacatgcacgatcacatgaatgtcgtaccgtcccagtctaacgcgcacggcttcgcatcatcacgcgataacggcggatttggtgaagaaaaccagacggaacttaccgatcatgatctcgtcgccgttgcgcagctgctgatggtccacccgctggcggttcacataggtgccgttgaggctgccggaatcgtataccgcgaatgtgtcgccgacgcggcggaacacggcatgggaacgggataccgtcgaatcgtccagcaggatgtcggcgcgggagtcgcgcccgaccgtcacctcgtcctcatcgagcaggtagcgggacccggaaacggcgcctctggtcgagatgagcagtgcggtgcccggtgcgagccgcgcgatggtttcgatgtcctcctgcgtgaggggacggtcacctgtagtggtgatgggaatctggatggcgggcagaccaataatggtcgtctcgcctgcacttggaatcggatctgtcataaacgctattctacagcccttgcatacgtattgtcggttgacttgcgaatttggctgatggtaatcgaatccgaggacgtcacgctcaccgtcgcgccgtacttcaccttcagactcgaacccacgccacccgcgatattgacggcgttctgaaggttctggggatcgccgatggccaggatccgatacggcgcgctcagcgcgacaccgtcgcattccaggccgtcgtccgtgtcgctgacataggttttcgtcacgacacgcacgctgttgatggccatcacctcggcgcctgcgttgcgcagttcctcgatgagtttgtacatcgtcgccgcgtcgatcttcgtcttcgacccttgggagatgctgatcgacacgcccttgcccgtcgcgggcaaacgaccggcgaggatgccgttggtctcctcgttctgcttggcgatgcgctccgcctcctgcgtcttgttcgccgcggccttgagcgatcccagctgattggtcagctccgacttgcgctgctccaggttctgcacctgtgtgccggtctcgctgatcagcctggtcagctcgtcctcgctcagcgtctcgtatgtggcgtcggcgttgttgatctggatcatgtacccgtatcccagcagcgcgcacatgatgaggatgagcacgctcgtcatcaggcgcatgcgcgccgagccgtccttgacggggcgcttcggcttcttgcgcaccacggggaacgagccggtctccatgcgatcgttcttcttgtcctgcgcatgctgctcgtgcagctgcgacagcacgtcacgagacgatttgtgcgccaccatggttcatcacccccggaagatgaagcgacggattgccgacacgttcgagaagatacggattcccagcacgacgatgacggccgtctgcagctgggatccgacgcccagctgattgcccaggaacaccagcagcgtcgcggtgaccacgttcgagatgaacgagatgacgaacaccttgtcggagaagctgcgctcgaagtacgcgcgggccgctcccagtagcgcgtcaagcgcggcgaccaccatgatgggaagatacggctgcagaatgatggggatatccggcttgacgaacacgccgagcaccacgccgatgatgagacctagtaccgctgccatctactcgctcctctttgcataggacaattcgccggaaggcgccgcttccagtgtaatcgaactctctttattcacctgagggtatatgcccgcctgggcgaacgaatcatacagactgcgctgcgtggacttgctgaccgcggaggccagcgtgtcgcggtcccctatcgcctggatcgtgtacgggctggtcacggcggtgacgccgacgagaatgttcgatcccgccttgcgcaccgatgtctgcacgccgagccggttgccgttgatggctatgccctcggcgcccgcctgccacagcagtcgcaccagcagccgcaggtcggcgtcggtgaccacgcgaatctgcatgccgctggactcgcgtggcgtcgatgccccgtcggagccggcggcgatggggtcggccagggtcaggctgatgcccggcccctccacggcgacaagcccgttgaccatctcgtcgttgaccagcgtcgaatcctcccccgtgccgcccagcttcttcgatcgttccgtgacctggttgcgcagatcgttgacttcgttcatgagcgtgtcggcctggccgcgcgtctcgcgcagctcgctggcgaggctttgcctgacgaccttgcgcgggtcggaatgcagccgttcgatgaacagcgacccgtagaaaccgacggtgatgcaaatggcgaacaccagaaacttcgtcgcccacgtcgacagacgcgagcgcggacgctggtcgagcctcgaatccgagaacagcggatccatggggcggttggtgagatcgtcgatgagcttgagtgaatcgtcatgcagccgtctgcggcgggccggcatggtctgcccgccttccgcgggcctgacatgccgggactgcgactgggccacggaatccgaaaacaccgcgcgacgtttcaccggcgcgttctcggccggcacgggaaacgacagcggcttgatcggatcagcgtccatcggcacgtttctctttcaccagcagtgaaatgccttgcttgctgtagatgcaaccggcgagccagtacagtccgacgccccagatgccggcggccagcgcggcgaggtgcagaagcccgacgaaggggttctcccagatgtcgcagaaaatcagcgcgacgatggagaccatcagcatgaaagtgcctgccttgccgacgaaatgcaccggcagcgggccgtaatcgtattgagcaagccacagcacgagcagcatcatccatgcgtccctggccgcgatgatgatgatcatccaccaggggatgatcccggcgacgcccaatgcgaggacgctgcagatgatcagcaggcggtcggcgatgggatcgaggatctgcccgatcttgctcacctgattgaaggcgcgcgcgatgatgccgtcgaggctgtcggtgatggccgaaacggcgaggacgatcagtgcgggcaccatccggtgatcggcgaccagccatgcgataaaggggatggacgcgattctcaggacgctgatgaggttcggcacggtgaagtagatgtccctcggctcggggctgtactcctggttgaacttctgcttgatcttctggcggtatccgccgtcggcgtgctgctgtgtacccattgtcgaaccccgttcgtcacatgcgggaggcctgcagcgcggtcacgatgatggcccgggcacccacctcgtacagcttgtccatcagctggttgaccttcgccttgggcaccatcacgcgcaccgcattccactgcttgtcgtgcagcggggatacggtcgggctctcgaatccgggggtcaccgcgacggcggccgccaccttgccgacggggatgtcatagtccatcagcacgtagcgctgcgcggtcagcacaccctgcagtcggcggctgaggatggtgagccgctcgtcctcggggtcgaggcgcggggagcggatgagcaccgcttcggagtgcatgatggggtcggcgaagatgcgcaggccggcgttgcgcagcgtagtgccggtggacaccacgtcggcgatgaggtcggccacgcccagctgcaccgaggactccacggcgccgtcgaggtggatggtctcggcctcgatgccgtgcgccaccagatagtcgtgcacgagcttgtcgaaggacgtgcccacacgcttgccctggatgtcctgcagcgtatggaagtcggaatcgttcggcgcggcgaagcggaacgtggacgcaccgaagccgagctccatgtgctcgctggcctcggtgccggagttcagcagcaggtcatggcccgtgatgccgacgtcgatggtgccgcggccgacatacacggcgatgtcgagcggccgcagatagaacagctcgatgtcgttgtccgggtcctccaccacgagctgacgcggattggaacgcagacgataccccgcctcggacagcatgttccaagcgggctccgacaacatgcccttgttgggcactgcgattctgagcatggtgtttctccctccagaccggccggtctgtttgtcacaggtgcttataaacgtcctccagggtgatgcccttggcgatcatcatgacctggagatggtacagcagctggctcatctcttcggccgtgcggtccgcgccctcgtattcggccgcaatccaggtctcccccgcctcttcgatgatcttcttgccgatgaagtgcgtgcccttggcgagctcgtctacggtcagggagccttcgggcttggtgacggccttctcggacagttcggcgaatagcgattcaaacgtcttcatgatatgtgtcccttgagattgtgcatggttgaggcactcgacggcgtcgccgcgatcgcggtccggcattggtgtcggagccgtcgcgtgccatgttctgcgtttccgccgtcagtcgcggtatgcggcagcggccttgtccctgatctggtcgatggcctgggccgggctctcagcgccgtacacggcggagccggcgaccagcacgtcggcgccggcctcggcgacgatgtgggcggtcttcgggctgacgccgccgtcgacctgaatatgggtggacaggccccgacgcgtgatctcgtcacgcaggcgacgaaccttcgccatctggttgtccaggaacttctgtccgccgaaaccgggttcgacggtcatgatcagcaccatgtcgaactcgtcgaggatgtcgaaaatcggttcgaccggctcggcgggacgcacggcgaagcatgccttgcagcccatgtcacgcagctggcgggccagacgcaccggcgcgtgggtggcgcccatatggaacgagatggaggcggcaccgagcttcgcgtattcgggggcccaacggtcggggtcctcgatcatcaggtgcacgtcgaccggcaggtcggtgacctcgcagatgcgcttgacgatgggctcgccaagggtgaggttcggcacgaagtggtggtccatcacgtcgacatgcacgaggtcggcgttggcgatggccttgaggtcgcgttcgaggttgcagaaatcagcggaaaggatgctgggtgcgatttgtatgctcatggctctcattctatggtggaagaacgacgagacggcttgcgcctacacgacgttcttgtttgtgtgttatggtattgcggttttctatgctcttgtgcgatatcctgattcggacggatgcgggcgctcagtcctgatggatctcgctctcggcggtttcggcgggagtctcgggcttcgcggtcttggccgtcttgccggatttcgcagcggcccgctcttccagctggcgctgacgttccatctcgtcggccgtgaccgcgcgcagtctggatgtcaggtcgcgtgtctcactgccgaagcgccacaacacgacgaacaggatgcacccggcaaggaacacgatgatcgcggtccacacgttgactcgcaggccgaggatgatcgtcgaatagttgatgcggatgctttcgatccaggtgcgtccaagcccgtaccacatcatgtacatggcgaactgctgtccggatttgagcacgtcgacgagtttgtggccgagccacacgataatcgcggcgccgatcaggttccagatcatctcgtacaggaacgtggggtggaacagcgtgccggtcgggcatgcctgtccgttgtagcagatctcacttttgccgatggcgtccgcatcgttgagcttgaggccccatggcagcgtggtcggcatgccgtacagttcctggttaaaccagttgcccagtcgtccgatggcctgcgctaccatcagcgccggcgcgatgcaatcggccagcagggcgaacggataacgccggtggcggcaccacaggaacgcggccaaggcccccaccccgatgccgccgaagatggccatgccgccttcccacaccttgaggatgttgatgaggttgccggttggcgggaagtagatgtcgggcgtcgtgatgcagtggtacagacgggccccgaccaggccgcagggcactgcgaccagcgtggtgtccagcacctggtcgaaggtgcccccgttcttcttccatctgacggtgaggatccacacggcgaagatgattcccgtcaggatgcagatcgcatacatgtggatcgtcaccggtccgatggagaacttggagaaccccggtgaggggatatacgcaagattcatgcagtgcctcgtttgtctagaccgctgttaccgccatctaccctaccccatggccggcggatgcacggtaaaggcagcccgccggcgcgggggtgtgtcagcgtgactcgttgtggatgccctcggacagcgcctcgaccttggcggccaggtcgcgcagtccttccttcggcgtcttcgcggtgacgttgtcgtcgtcaagcagggtgtgcaccagagcagaaccgacgatgacgccgtcggcgtaggcgccgaccttcgcgccctgctccggggtggatacgccgatacccacgcacacgtttctcgccccggcgttgcgggcacgctcgacaagcgtttcgggcgatgcgctgatggtgtcgcgctcgccggtgacgcccatacgggatgccgcgtagacgaagccgcgtgcgttgcgggcgaccagttcgagacgttcggaggccgaatccggggagaccaggaagatgcggtcgagtccgtgacgatccgaagcctcgatccactcgccagcctcatcggggatgaggtcgggggtaatcaggccggcaccgccggcgttctcgaaatcgcaggcgaaccgttcgacgccgtaatggtagatcaggttccagtaactcatgatgagtggcacgccgccggcgttggccaccgtctcgaccgccttgaacacgccgttgatgctttccccgttgttcagggcgatctggctggccgcctggatgacggggccgtccatcaccgggtcggagtacggcaggccgatctcgaccgcgtcggcgccgtgctcgaccatggtcctgagcgcgtcgagtgagatgtcggggttcgggaagccatacggcaggtatccgatgaaggccggcttgttctcggccttgagccggtcgaacatggcttccgtcgcactgggcttgtgactgatgccgagcggctgtccggacggcgtggttgctgtattcgtcataatcaaaaactccttctgcttcacgggccggttcaggcgacggtgtcgccctgcgcgccggtgacatcgagcgccgcggcctgctcgtcggtcaggtatccgaaccatttgcccgcggtggccatgtccttgtcgccgcggccggagatgttgacgatcatcacggccttgtcgtatcccttggccttcagatcagcggcggccttgaaggcgccagcgacggcatgcgagctctcgatggcggggatgatgccctcggtctggctcaggtcgcggaaggcgttcatagcctcctcgtcggtggcccaggagtagttcacgcgcccgatctccttgagccaagcgtgctcggggccgacggaagcgtaatcgagaccggccgaaatcgaatacgtgtcgagagtctgtccttcatcggtctccaacaggtagctcttggcaccctggaacatgccgagctgtccggtgcccggtgcgaaacggatcgcatgatggcccgaggccggcccgttgccgcccgcctcatagccgtacaggttcacgcgctcgtcgtcgaggaacgcgttcatcacgccgatggcgttggatccgccgccgacgcacgcgcacaccgcgtccgggtggtcgatgccgtaccagtcctgaagttgctgcttggcctcctcgccgatgatcttctggaagtcgcgaaccatggccgggaacgggtgcggtccggcgaccgtgccgagcaggtagtgcgtgtcggcgacgttggtcacccaatcgcgcagcgcctcgttgattgcatccttgagaatcttgtcgcccagtgtcacttcgacgacctcggcgcccagcatgcgcatgcgggccacgttgagggcctgacgtcgggcgtcgatctgtcccatgtacacacggcacttgagccctagcatcgcgcacacggtggcggtggccacgccgtgctgtccggcaccggtctcggcgatcacgcgggtcttgcccatgcgcttgacgagcaacgcctggccgagcgcgttgttgatcttgtgcgcgccggtgtggttgaggtcctcgcgcttcaagaagatgcgggcgtcgagtccggtcctgtccttgaccagcgcggcgaatcgcggggcttccgtcagcgggctcgggcggccgacgtaccgctgctgcagcgtcatgaattccttacggaactcggggtcggccttggcctgatcatagatgcgctccagctcgtccagagcggtgatcagtgcctccggcacgtatcgcccgccgaactgtccccaatatggtccctgatgctcgctcaacggggtcgattcggatgctttcactctctgacctgcctttactagtcgtcgtacggcggccacatggtcgtcggcggtggccacgccttcgcccaccagcacggcatccgcgccggcgcgaccgtaatcctcgacctcgaccgaaccgaacacgcccgactctgcgacgcggatcacgtcatcgggcagtccttcggcgagttcggcgtatttgttcacgtcaaccttcaggttcttgagattgcgcgcgttgatgccgatgatccgggcgccggccgcgaccgcgcggcggatctcctcggtggtgtgcgtttcgacgagcacggccatgccgagctcgtgggcgagttcaagcaggtgcgcgagctcatcgtcgtccagcgcggcgacgatgagcagcactaggtcggcgccgtgggcacgcgcctcgtagatctggtagtcggtgacgatgaagtccttgcgcagcagcggaatgtgaaccgccgagcggaccttgtcgaaatcgtccagcgagccgaggaaccgccggccttcggtgagcacggaaatcgcgctcgcaccgccgcgctcgtattcgcgggccagggccgccgggtcggggatatcgctcaaatgccccttggacggggaggcgcgcttgatttcggcgatcacggggatgccgtccggacgcttgagccatcgcgtcgcgtcgataggcgccggcgcggccagagcggcccgtctcacatcctcaagagacacgacacattcgcgggaacgctggtcttccaacgccccggcaaccaattcgtccaaaaccgacataatgctcccttatagatcgttcggtcagtcgccactgtaattcatggcagacgacaaccgcgcgttccgtcctacattctgggcgtggccgcgggccggagcgggccgggatcgtggcccggcaacgaaagcggccgccgcggaggaatccgcgacggccgcgcatgcacgctcatccgtgcagggagagaccccgcgtcacttgcggcgcttcttctccctgatgttgacggagatctggatcggggtgccttcgaagccgaactcctcgcgcagggagcgctcaaggaaccggcggtagccgtgctccaggaatccggtggcgaagatcacgaagcgcggcggacgcgtggacgcctgcgtggcgaacaggatacgtggctgcttgcctccgcgcagcggatgcgggtgcgcggcctggatctggccgaggaaggcgttgagacgcccggtgggaatgcgcttgtcccaggattccagcgcgttgcgcatcgcgtcagcgaggcggttcgtgtgccatccggtcttcgcggacaggttgacgcgctgcgcccacgtcacgcggttaaactcggtcttccacaggcgctccagcctctgccggccgaaatcgtccatcaggtcccacttgttgaacaccagcaccaccgcacggccggcgtcgaccgcctggctcatcaccttcagatcctggtcggagatgggctgggacgagtcgaacaggaccagcgcgagctcggagcgctcgattgcggcctgcgtgcgcagggacgagtagtagtcggcgccggacaccttgtgcagtcgacgcttgatgccggcggtgtcgatgaacagccagtcctcgccgtcgatgtcgatggtctcgtcgaccgggtcgcgggtcgtgccggcgaggtcgttgaccacggcgcgctgttcgccggcgagctggttgagcagcgacgacttgcccacgttcgggcggccgacgagcgcgacacgccgcagatgcgtcggcgtgaggaagcccgaggtcttgtccgccttgcgcagcgaatccagcgcggcgtcaagcaggtcgccgactcccctgccgtgcatggccgagatcccgtaaggctcgcccatgccaagcttccagaactcggcggtcaggtattcgctggccccgtcgtcgaccttgttcaccgcgagcgtgaccggcttgccgctggcccgcagcatcttgacgatgcgctcgtcggtgtccgtcagccccacgtggccgtccacgacgaggatgaccgcgtcagacagctgcacggcgatctgcgcctgcgaggcgatggcggattcgatgccttcgacgtcggcctcccagccgccggtgtcgacgagcttgaattcggtgccggaccattccgcgtcgtagctgacacggtccctggtcacgccgggcgtgtcttcgacgaccgcggcgcgacggccgaggatgcggttgacgagcgtcgacttgcccacgttcgggcggccgaccacggcgagcactccgacggccttgggagccggcgactcgtcttcgatcccgtaccgggaaccggcgatgatctgctcgtcgccctcatccagttcgtaatcgctcagattggcggcatactgctcgtactcctgcacttcgaccgcgtccgcgaccagcgtgatcagcacatccagcgtctgctggaaattcatatcggagttgtcgacggtggtcacgccgtctgccgcggtcaggaagctggtgaccttggaatcggcgcggtcgcgggcggccacgtcctcgccccccacgccggcgccggcgacggcctgccccgtgcggcgcgcctgacgcacctcttcccgggcggtcagcagcacacgcacctcggcatcgggagccacgaccgtggtgatgtcacggccctccgcgacgatgccgcggcccagcgagaaagagtcggccgcggactcgcgcgcaatgtaggcgcgctgcgcggcgatgagcacgtggcgcaccgggatgacgttcgacaccttcgacacgtgcgaggagacctcggaggagcggatggcctcactgatgtcctcgccgtcggcggtgatgctcggatggtccgggtcgacgccgatgtcgaagtggtcgccggtgaagaattcggcgactgcttcggtgatctgctgctcatccacctgatcgccgtcgaggtcgatgccctgatgcaggcaccaccaggcgcatgcgcggtacatggcgccggtatcgaggtaggcgaagccgaaatggcgggccagcgccttcgaagtggaggactttccgacgcccgcagggccgtcgatggcgactcgtatcacagcccgacctccttctgcagggaacggacctcgacctgggacagcacacgataggtgccggacttgaggtcaccgagcttgatcggcccgatctgggtgcgcaccagacggcgaaccgggtatccgatggcgccgaagatgcggcggacgatacggttcttgccggagtggagcaccaccttgacgatggtctggtcgcggttggcgtcgatgatggcgcaatggtccagcttgaccaggccgtcatccagctggacgccctgggtcaccaggcgccggcagacgttgccgccgatcttgccatcaatcgtggcgatgtaggtcttctccacctcgtacttcgggtgcatgacgtgctggctcagctcgccgtcgttggtcatgaggatcaggccctcggaatcgtagtcgaggcggcccatgtggaacacgcgctcgtacttgtccccgatgatgtcggccagcgtgtagcggcctttcgggtcgtccatggcgctgagcaccttcttgggcttgttgagcgccaacgtgacatggttcgggttgaggtggacgcgcgagccgtccacacggatgtgctgcttcttcggatcgacgcgggtgccgagttcggtcaccagctccccgtcgacctcgacacgcccatcggtgatcatctgctcgcacttgcggcgtgatccgaagcccgcttgcgcgaggatcttctgcaggcggattccttcgttgttgttgtcgtcatgcgctttgagtgcgcgcgaatatgcgtttggcatcgttctcccaacgtggccggacattgacaatgaatctgcgctcccggacaaactcacagggaaaacacagccaatacattgtatcgtatcgtccccccgttggtaaacttgcaacgttcggcgggtcgcaaagcccgcaacatcagaaaaaggacactacaacatcatgactgaagaacagaacaccgagccaagcgcttatccgatcggggcgcgcgtgtgcgcggagcttgcaggcagcttcctcgtctgcttcgccatctatatgatctgcacgttcggcacttcgatctacgggcttgacctggcgtacatcgtcgtgggcaccgcgttggcgtacgcggtcgtcaccgcgatgctcgggcgtgtctccggaggccagttcaatcccgccatcaccgtggcggcgatactcaccggcaagaccaaggtagtcgccggcatcctgtacgtcatcgtgcaggtggtcggagcgatcgcggcggccggcgcggtcaggtggatcctgccgacctcgcagaccgtcaccatgaagacgtggctgacgcccgccgtcaacggctatggcaccggttccgtatcgagcgccaccaccagcagcgcatcggtgagcttcggcatctccatggccatcgtcgtcgaggtgatcgccgcgatcatcatcatcgcggtcgcgatgcgtcacaccgatgcgaacggcaagccgtatgcgacgtacgctccggtgatcggcgccgcatacggcctcggcgtggccatgacctatacggtcaccggtgccgcgctgaacccggcccgcgccaccggcatcgcgctgttcgggcagaatcagggtctttcaacgcagccgctgcagcagttgtggatcttctggctggcgccggtcctggccgcggcgatcgtggcgctggtcatgatcatcgctgatatggcgtcgaaacgcaagccgaagacgcctgcggatgcgcccatcgacgaggcgacggacgctgaggcggatgcacatgacatcgccgtggacgcggcggtcaatgcggcgccccaggttccgtcaacgaatccagaacagtgacggtgcgaaatacaacagaagcagtcccagccccaaaccgatgccgataatggcgtcgaacaggactgaccggactttccaagggctcttctcgcgcatgatgatgcgcagcagggccgtgacgatggccgtgacggcgatgatcaccgtcgcggccatcgtatatccaaggaaggcgacgaccagggcgacgatgacgacgccgagcacgcaccactcgaatgccggcttgccctcgtggacttcggacacatatggatgatgctgattcatggagcttcctcggggattggttatcgtgatggatcggccgcgaacccttgacggtcggcgtccgatccgtgaatcggtgaccggacggcggatcagtggaagaagtgacgggtgccggtcaggtacatcgtcacaccggccttcttggccgcctcgatgacctcctcgtcacggatggatccgccgggctgcacgatggcctttacaccggcgttcatcagcgtctcggcgccatctgcgaacgggaagaacgcgtcggacgcggcgaccgaaccggtggcgcgatcggcgccgtcggccagcgtgttggcacgatcgacggccagatggcaggagtccacgcggttgacctggcccataccgatgccgaccgtggcctggtcgtgcgcgagcaggatggcgttggacttgacgcagcggatggcgcgccaggcgaacacgaggtccttgagcgtggcctcatcggcgggttcgccggccacgagcttccatgcgtccggatcgtcgccggtggcattgatgaggtccatgtcctgcacgagcaggccgccgtcgatctggcggaactgcgtgtggcccttcggcggctcggccaccttgaggatgcgcaggttcttcttcttggtcttgagcagttcaagcgccgcgtcctcgtaggcgggggcgacgatgacctcggtgaagatcgggcgaacgctttcggccatctccaacgtgacggtggtgttgcaggcgatgacgccgccgtaggcgctcaccggatcgcaggcgtgggccttcttgtgagcctcggccgcggtggctccgatggcgaggccgcacgggttgttgtgcttgaccacggccacggcgatggcgggtgccatatcccacacggcgcgccatgcggcgtcggcgtccacgtagttgttgtagctcatcggcttgccgccgagctgctcggcgtgcgcgaagccgtcgcggtcgagcgggtcgaggtagagggcggcctgctggtgggagttctcgccgtagcgcagcgtgtgcgcgcggtcccaggtgcgggtgaacgcggccgggaacttcgcctcgttgaccgggttctcgccttcggccgggtcggcggattcgacggtggcgggcttgggccagtgcttggcggtccactcgttgatggtagcgtcataggcggcggtgtgggcgaacgccttgccggccagccagcggcgctcctccagactgaagccttcaccattggccacacgggccgcgacgagcgcatagtcggccgggtcggtgacgatggcgacggtggtgctgttcttcgccgcgccacgcaccatggacgggccgccgatgtcgatcttctcgatgaccgcggcctcgtcggcgccggaacgaaccgtatcggcgaacgggtacaagttgacgatgaccaggtcgaagggcttgatgccgaacttctcaagctgggcggcgtgatcggggttggtcatgtcggcgaggatgccggcgtggatgtgcgggtcgagcgtcttgacacggccgtcgaggcactccgggaatccggtgacctcgctcacctcggtgacggcgacgccgagttcggcgagacgcttggcggtcgagccggtggacaccacttcggtgccggccttgatgaaggcctcggccagtacttcgatgccttccttatggaagacggacaccagagcccgtcgtatcggtcgattcgtgttggtcatcgtgctccttcttggttgttggttgtatggacttgcgggaaacgatggtacgcgggtgcgttgttgcggctcgttgtgcccccgttcttcgtgcaatccagcgtatcccgaaaacaatggcgacgccaatcagcgccagcacccaggccatgcacagtcccatggcgctcggacgtccgacggcctgcgcggactgcatcacgtcgacgccgacgtatttgagcctggcctttcccagcgacccgttcgacaccccgaacatgatcgacgacagcagggatatgaccacgctcgacaggcagaacccgcccgccgggtaggcgagttcgagaatcaggtccttgcggtcgaggggatcggacgcgctgccgacgatgatgcggaaaccggatttcatcgccatggatgccagcccggcgacgaatccgacgaccagcggaatcagcacgacggcgaaccgtatgccttcatcgccgactgcctgcggaagcaggccgaaaacaggaagaggcggaagcgaacgcccctgcccgatccaaagggtgaatgtcgcaagctctccgatgtggaatccggcaccgaacagccacgagaccgcccatatgcacaggttgggcagccatgcaagcgatgcgatcgtcgtcagtatgcgcgagccggtccccatgccgatgtcggcgaacagcgtgtccatggccgaacggttcagcacgccccacacgatgacggtgatcagtcccatgaccaggtacacgcccatcatgatgacacccaccatcaggccggtcctgatcgtgcggcgcacgccgtcggacacatgatgacggataagttcacgcagctgcccggagagcgtgcccttcgacagcgcggcgccggcgaatccaagcgagaacaccacggccgatttgacgcataccagagccggccagtcaagcaatccgacgggaagcgactgcgtgcccatgacgttgatgaaaatccagaccaccacgccgctgacgtatgcgcggatatccgtgcatatcttccggctgaacgaccagaccaggcctatcagcagcacggtgagcagcagcggcatgatggacagggaaagcgagtcggtctcgaatccgatgccctggctgagcaggaccacgatgcgggtcatgtccaacgtcgaggacgacaggttttccccaccttcctccatcgagatgaccagcagcatgagcgcaagaaagcagcccagggcgatggcgtacaacgccatcgagccgatggcgatgatcggccctctgagccaggcctggatacgcttcctcataccagcgagcgttcggcgagcaccttgcgcatgaggtccgcggtctgaccgggagtgcgtccgacggggataccggcggcctccagcgcgattttcttgtcctgcgcggttcccttgcctccggagacgatggcgccggcatggcccatctgcttgccttccggcgcggtgaatccggcgatgtatgcgacgacgggcttggtcatgtgctctgcggcccatgcggcggcgtcctgctccgcgctgcctccgatttcgccgatcatgaccactgccttcgtgtcggcatcctgctcgaattcctgcaaggcctccagcagcgtggtgccgacgatggggtcgccgccgacgcccaggcaggcggtgaagccgatgtcgctcagctcgcccatcagctggtaggtcagtgtgccggacttggagaccagtccgatggggccacggcccacgatgccatcggggatgatgccgaggttgacgccatgctcgttctcctgcgacggcagggtgagcaggccggggcagttcggtccgatgatgcgcacgccacgctgaagggcgagttcgacgaagtaggcgctgtccgcaacgggaatgccttcggtgatgaccacgatgagcccgattccggcttcgacggcctcgaccacggcgcctttggcgaaccgtggcggcacgaagaccacactggcctgggcgcccgtcgcctccttggcttcggcgcacgtggcgtacaccggaacggagacgtccctgccctcacgcgcggcctcgaacgtcacttggttgcccgccttgcgcgggttgacgccgccgacgatgttcgtaccggcacggagcatgcgggcggtgtgtgtcatgccctgatgcccggtcatgccttggacgatgacgggagcatcctcctggatgaatgcggtcattgcttggcctccttcgatgccttggcgttcgccgccagacgagcggcctcggctgcggcctgctccatggtgccttccacatgcaggttggggttgttcgccgcgacgaggatctgcaggccctcggctgcggcattgccgtcgaagcggaccacgagcggcttcgatgtgtgcagctcctcgaacgcctgcaggatgcccttggcgacctgctcgcatgaggtgatgccgccgtagacgttgatgaacacggattccacctgcgggtcggacagcacgatggacaggctgtcactcatcaccgcggcggacgcgccacctccgatgtcgaggaagttcgcaggcgtgacattcgtgccctgctccttgccagcgtcccagacggcgtcgagcgagctcatgaccaatccggcgccgttgccgatcacgccgacctgaccgtcgaggtgcacgtagtgcagcccgtgttcggctgccgccgcctcgaacggatcggcctgcatcggatcgtcgaagcgggcccacccgtcgtgccggaacgccgcattgccgtccaacgatatcttggcgtcgagggcgcacagtgatttggacgcctcatcgtcgggatcgccgatcttggcgagcgggttgatctccaccagcgtcgcgtcgttgtccttgaagcactgccacatgcgcagcaggatgttggcggcctgatccaggtcggcgtggtagaagccgatctggccagccatgcgcttggcggcctccatgtcgaaatcgccgagggcgttgatgtgcagacgcttgaccgattccggatgttccttggcgatctcctcgacttcggtgccgccgttcgcggtggcgaggacatcgaagtcccgcgatgtgcggtccacggatatcgacacgtagtactcgtgcaggatgttcttcgcctcggcgacgagcacaccgttgaccttatggccgtggatggtcatcgggaggatggattcggacagcagtatcgcttcgtcccggttgtgggcgatcttgacgccgcccgcctggccgcgatggccgatcttgacctgagccttgatcacgcacgggtatccgatggcatcggccgcttcggcgacctcgtgggagttctgggcgaaaacggcccgcggcgtgggaatatgctgttcctccagcaattctcgtgcctggtattcataaagatccatgttcgacgcctcacgttcctatgatgtgttcttcgaatgatgattggtgccgtgcggcgcgtcccgacgcacggcaccgccgggtcacgccggcatcgacaccagtgtgctgctgggtttgtcgcccagtttgtctagtccgtcgagtcctcgcagccccatgacgaagctgaatccgacgaccgtgcccccggccgcctcgaccagatccatggccgccttcgccgttccgccggtcgcgatgagatcgtcgacgatcagcacccgatcgcccggacggatggccgacgtctcgatctccactttttcggtgccgtattcgagatcgtattcctcggcgatggtctccggcggcagcttgcccgccttgcggatcgcgatgaaccccttgccgagcatggccgcgagggcgggaccgaacaggaaccctctggcctccagccctgccaccgcgtcgaacgagtcttcggtgacgggaaggctggcctggagcgccttcatgagaatgcgcagccccttgccatccgccagcaccggcatgaaatcacggaatttgataccctctttggggaatcccggtatggtgcgaatcttcgagacgaggtatgccgcgtcaccggcaccgacatcggccagtctctcaatggtgatgtcagactgcgtcatggtctcgcgctcccccgtcacttctcggcgtctgcggtctgcgcggaatcgtcggactgcgttgcgttctcggcggattccagcgccttgtccaccggtacctgggcctggtcgtcggcttcgtcggtctgctcggcgtcctccacttcgtcgtcatggatgaaggcgggacgcgtgtactccttgttgatggcgcggaaggtgaagcgcagcagggagccctcggagtcgatgacgatctcctcgtattcctcgtccacggacactaccttgccgatgatgccgccaatggtgattacctcggttccgggctcaagggaggagcggaagtccttcatcttttgctgctgctgcttggccttgcgggactgccaccacatcatgatgccgatcagcacgatggaaacgatcatgatgagataggatgatgaaccttgcggcatgatttctccttgcagtagggaacgaatgctctatggacgtcggtcaacaaacaaccaatgttagaagagcttgctgacatcctctccgtttgtttcaccttgtggctccagacccagatgagaccaggccttggccgtggcgacccggcctttgggagtgcggatcagaaatccttcacggaccagatacggctcgcatacggtttcgacggtctccgattcctcgccgaccatcgcggccaggttgttcaggccgacgggccctccgttgaagttgcgcacgatcgcgttgagcacggcgatgtccagccggtcgaggccctcggagtctatctgatagagcgcaagcgcggcgcgcacgtcatcgacgtccacgacttgcaggtcatgcacgatcgcccagtcacgcacacggcgcaacagcctgttcgcgattcgtggcgtgcctcgagaacgcagggcgagttccgcggcagccccctcccccaatgacactcccagaacgccggaggatcgctcgatcagcttttcgagctcatcgtgggggtagaagtcgagatgggccgtgaagccgaaacgcgcacgcagcggagaaggcagcatgccctcccgggtggttgcgcccaccacggtgaatctgggcagcgtcaacgggatggacgaggcgccgggccccttgcccaccatgacgtcgacgcggaaatcctccatggcgatgtacagcagttcctccgcggcgcgcggaagacggtggatctcgtcgatgaacagcacttcccctgcgtccagcgagctgagtatcgaagccaggtcgcccgcgtgctggattgccggaccggacgtgatgcgaatcggcacctccagctcgttggctacgatcatcgccaacgtggtcttgcccaatccgggagggccggcgagcaggatgtggtcgggggcggtgtcacgtttgcgggcggcgtccaggaacagctgcagctgggccttgagccgcggctgcccgacgaatccgtcaagggcatgaggccgcagttcctcgtcgctgatcggctcgtcgttgattgcggtggcggagaccatgcgtagggagtcctccgagacgccggtgttggtccgtccatcctgcatgtcgatgttggatgtcatggaatatcaccttcctctgtccagcgacgacaatgccagtttgagcacccgcggcacgtcctccgcactgatgggggtggctatggacgcggcatcgcatgcctgacgtacggcctcctccgcggtctgggggcgccatcccagagagacgagtccttcgatcacctgcctggctccggggtcgcgactttccgacggcccatcggcttcgggccgtatctggtcgaggtcgatgcgtcctgccagttcaaggatgatcttctgtgcgccttttttgcccaggcccggagccttggacaatgccgccgtgtcgccgtccgcgacggccttggccagacggtccggaggcagcgtcgacaacagggaaagcgcgaccttcggcccgatgccactgaccttctgcaattgcaggaacatgcgtttggacgcgggtgacaggaacccgaacagggtgacggcatcctgcgatatggtcagcgaagtgaagacgtgcgtttcctgaccggcatgcaacgccgcaagatcggccgccgccatgcggacctcgtacccgacgccatgaacctcgatcacggcgctggatgcctccaccgactcgacgcgcccggttaacgtactgatcatcacgtcgtcctttcctcgccgaaccgcacgcggaatgggccgccacgagctcgttcgcctcgcatcgcataacgaaagcacatgccgaacgcgcccgccccgaactggcacgtcgtgcgggatatggtgtcgagacggcccatccacataatgcagaacatctgttcgatacacattacatgccgctgcggacgccggcgcgtcgagcggccttctgcgccgcctgcgcccactgccgttgagccgcggtcagatgctgttcccgttcgcctccctgcaaggcgccttgcgggcgcagggcatggcatatcgccagcgacagtgcgtcggcggcatcggcgggctgcggcaacgtgttcagccccagcaccttggccaccatgcgttcgatctgtatcttctcggccttgccgttgcccgtgatcgcgagcttcgcctcggtcggcgtgtgcagcgccacgggaatcccccgttgcgcggcggcgagcatggccattcctgcggcctgggcggtgcccagcacggtgttgcggttcgactgggcgaacacgcgctcgatcgacaccgcatcgggaatgaatcggtccattttggagcacagcccgttgtagatcgtcagcagtcggaggtcctgcgacgtatggggatccgaacgcaccacatcgacgtggataaacgaaagccggcggttagcgccggcttcgatcacgccgaccccgcagcgtgtcagcccgggatcgacgccaaggatgatcacaggggattactcctcgtccgcgagctgggccatcacctcgtcggatgcggtccagttggcgtagatgttctgcacatcgtccaggtcatcgaggttgtcgatgagcttggagaccttctgggcgtcctcaaggctgagcgacacctcgttcttcgggcgcatgaccatatcggcggagtcgtagtcgaaaccagagtcctgcagagccttgcggattgtatgcagatcggagggatcggtgatcacggtgaacacgtcgccgtcgtcgatcacgtcttccgcaccggcgtcgccggccttctcgaacaggtcgtcgaagtcgacgccctcgctcggaacctcgatctggcccttacgctcgaagttgaagctgacggaaccgctggtggccagcgagccgttgcccttggtcagggtggaacggacttcggcggcggcgcggttgcggttgtcggtcaggcactcgatgatcaggccgacgccggcaggcgcatagccctcgtacacgatgtcctcgtagttggcgccaccggcttcttcaccagagccgcgcttgacggcgcgcttgatgttgtcggccggcatggacgccttcttggccttgtagatggcgtcgtacagcgacgggttgccatccgggtcgccgccgcccatacgggccgcgatctcgatgttcttgatgagcttggcgaagagcttgccgcgcttggcgtcaatggcggccttcttgtgcttggtagtcgcccacttggaatgccctgacataatgctcctacaggtatacggatactgacaaacgtcactatgataaagcggcaagacgacaacggcagtcctgggttctgccgctgccggtcattacgccgcaagaggaaccgcaggcaccgccgaaagtcccatctgatgacacagaaatgggactttcgcgggatgacggacgatgatggagctgcgcacgcctgccgggccggcaatacggcgaggcctccgccgtgaaatgtacggcggaggcctcgttcattggtcagaggttccgattcgaatcagcgacgctgacggcgaaccgcaagcatcacgatggcacctgccgcgcagatcatcgcggccagtgcggcgccagagacactggcaccggtctcagcgacgacatcaccgggctttccgccttcgggcttgatctggggcttgttgtcgccggacggcttctgcgggtccggattcggcttgggggtcggatcgggatcaggatcgaccgtgcccttgtcagtgacggtcatcgtgaacgaatccttgatcgaaccgtcatccttcagtgccacggtcacggtcaaatccccggcggcctcgaacggcttggtcacatcgattgcgttgccgtccttgtcggtcaccgcgatcgtgtaatccgcggctgcgagcacggcggtcgtcttgtcgctcttggtggcgaccaccttcaccttcgacggatcgaacgtatcaccgaccttcacgtcggactgcaaggtcgaagcctttatggagacgaccgtcacctccggttcgggatccggatcaggcgtcggacgctcgtcgccggtccaagtctgagtcaccttaccgtccttgatagcgatgctcatcgaggaatccgaagggatcgggtaggtggaggaggacacggagacgtcgagacggcctacggcctcgctgtcggccgcgagcacgtcggacggcaaggtgacgtacacgtcgacgatggagttcatgtgcgccccgttgacgacgagacgaccgttcttcagctgctgttggctgtaggtctgcttcatgtccggtgtcaccggcagattgaccgcggtaccgccctcggccgtgtacgtggcagtgaagctcaggccatcggtgccggtcaggccgggttcggcgtaccgtccgacaagcaccttgccgtcggtcaccttctgctcggccgcgtcgacagccgcgtacgagcccttccagctggtcacctcggtggccttgtggaagttggcgccacggttcatcaggtcgatggcgatgtcgccgacgcgcttgttccagttgtcgtaatccttgcggttctgctgggtccagccgacctcggcggtcgccatcatgcgggtgtacatcaggaattcggcgtcgttgagagaacgcaggtgctcgctccacagcgcatcctcgacgcccagaaccttgtcctcggtggtgccggcggatgaggtcgggttccactggtagaagttgctggtcgtgcaggcgccgcacgcccaggtcacgccagtggtctcggtgccgggacgctgcgggaagtaggtgttgccggccggcgacatgatgatcttgccgttgcgctggttgagcagcttctggatgctggcattgttggctgcgttgccggtccaatgctgcaccacggatccttcggggatctggtcaaccgcgtcgaggccgtcgttccacacgatggtggtcttgtcacgttccttgaccagcgctccggaccgtccgagatactcctgtagacgttccgtcttgttgccggcgccgccgctgaggaacagctcatcgccgcccaggtggaagtacatgcgtttgagctcggacgcaggcatggtggacgccttgatgcccttgtcgatcatgccgtcgagctgatccatgatatgtcccagcacggtgtaggtgatgtcggcgtcagtcgcgaggctgctcctgccctgcgcagactggatgaaggcgggggtgtcctcgccggccgcaggcttcgggttggagttgccggtgttgagctcggcaaggccgtgcagcaggctgaaggaatgtccgggaccgtcgatctcgggcacgatggcgatgccgtgatcggcggcgtaggcgaccagttcgatgaactcgctctgcgtccagtagccggtgcgcccgtcctgtgccggggaccagttgctggtccacgcggactggtagctgatggcgccggacttgatcgcgagctgcgtgtagtcggtcgtatcgccatccgcacgcccgtcattggtgatctcgacgcggaagccctcgtcctcgctcaggtgcaggtgcagcgtgttcatcttgtaggccgacatcacgtcgatcatctgcttcatctcatcgagcgggtagaaggaacgcgccgggtcgaccagcacgccgcgccactggtaacgcggggcgtcggcgatgttgacggccgggatgaaagcgacatcggcaagcttcaccgtggagttcgtccacggaccgatcagctgcagcaacgtctgcgccgcccatatgcccgcggtggcgctgcgggccttgacggtgaccgagtcggcgtcggagacgatcgtgtaggcctcatcggcggtgatcgactgggcggaaccgacgtgaccggtgacgtccaggttctcgtcaagggtgaaggtgatcgggcagttcgtgccttcggcgagtttcaggccgtacgaggtgccgagctcgtcacgcatgacgtcaaccgcaggcaggaggctgccgtcgctcacggacacgcaggtgttcttcttaagttcaaacgcctctccatcagcggattgcgcatatagcggcctcggggtgagccggctcaacgggtcggtggcgactgccgagatggtccccatcgtgcgcatctcccacacggaaagcgaccaggattggcttttcgtggtcgcgatcatgcggatgtgccgggttttgatcggcgtgtcgaatgtggttttgacccattgcgcctgtgccgtcgccttgagtcccgtcttcacatcggtccagttggagccgtcatcggaagtctggatggagtagttcgtcgcataggtgttgccccaggcgatgttcacactggaaatcgtcgcttcgccggggaattcgtaggccagccaccaggggccgctccccctgtcggcgctccagcgcgaggcgccggatgcgttgtgcacgcttttgtcggtggggttgtccggcagatcctggttgtcggcggccagttccggcccgaatccggaactgacttcgcgaccggacgcggtgaccgtcgccatggtcgcgaggttggacactgtggaagtggatgattccgccgctgccgccgcctctgcgttgtgctgcgccaaggccgatgaggccggcaccagcagcatcgccgatgcgcagatcagtgacatgaatcttgcgaggccacgtcgtttgatattcatgggatgatggctctttctctgtatctcctggcaggctcgctattgaaccacaccattatccggcctattgaatggaccgcgactttacaatccagcgtcaatatatcacgtcatcccatttttgtaaatatagtgcacaaaatgagcgagtcttgacatcacttatggaaagacccccgtcggcaacgaaacggttgctgacgggggtcttcaacgggcgcgaggggcccgtgcgtcaccttatgccaatgcggcggcgaagtcgtccgcggagttgacctgcgcgcgcatcttgatgacggcgagaatcttctcgcgcgcctcgtccaccggcacgtcgttgagctggctgccgtcgcggaagcggaagctcaccgcgttgttgttcatgtcctcctcgccgacgatgaggatgaacggcaccttggacttggaggcgttgcggatcttcttcccgaagcggtcgtcggagtagtcgatctcgcagcggaccatctcgtcctccagcgacttgacgaaaccggccagatgcggcgcgaactcgtcggccaccggcacgccgagcacctgcacgggggcgagccatgccgggaacgcaccggcatagtgctccagcagcacggcgaagaagcgttcgatggagccaaacagggcacggtgaatcatcaccggacgctggtgggtgccgtccttcgcgatgtattcgagctggaaacgctcgggcaggttgaagtcgagctggatggtcgagacctgccaggtacggccgatcgcgtcgcgggcctgcacggagatcttcgggccgtagaacgcggcgccgcccgggtcggccacgaggtcgaggtgggatgcctcggcgacctcgcgcagcgtgcgggtggcctcttcccagatctcgtcggaaccgacgtacttgtccggatccttggtggacagctcaaggtagaagtcagacaggccgaagtccttgagcaggttcagcacgaaggtcagcaggctggtcagctcgtccttcatctgctcgcgggtgcagtagatgtgggagtcgtcctgagtcaggccgcgcacgcgggtcaggccgtggacctcgccggacttctcgtaacggtacacggtgccgaactcgaacagacgcagcggcagctcgcggtaggagcgctggcgcgacttgaagatcagattgtgcatcgggcagttcatgggcttcaggtagtagtcggcgcccggcttggtgatgttgccgtcggcgtcgtactcctcgtccaggtgcatcggcgggtacatgccgtccttgtaccagtgcaggtggccggaggtctcgtacaggccgcccttggtgatgtgcggggtctgcacgaagctgtagtggtgcttacggtgcatctcacgcgagtagtcctccatcgcgttgatcaccgcggcgcccttggggtggaacacggccagaccgggtccgatctcctccgggaaggagaacaggtccatctcggcgccgagcttgcggtggtcgcgcttggcagcctcctccaggcgggtctggtaggccttgaggtcctccttggtggcccacgcggtgccgtagatgcgctgcatggtggggttcttctcggatccgcgccagtaggcggcggcggaacgctcgatcttgaacgccttgatgaagcgggtgttcggcaggtgcggtccgcggcacaggtccttccagacggtgttgccgtcacggtcgacgttgtcgtagaagctcagctccttgccggagacctcggtggcggtggacgggtcgagatgcgcttccttgtcctcgatcagctcgatcttgaacggctggtcggcctcctccttgagggcctcctcctcggtgaccacacggcggcggaaggactgggcagacttgacaatgcgctgcatgtgcttttcgatcgccttcaggtcgtccggggtgaagggttcgtcgacctggaagtcgtagtagaagccgtccttgatgatcgggccgacgcccagcttcacgttcgggaacagctcctggaccgcctgggccatgacatgcgtggcggagtggcgcatgatgccgaggccgtcttcggaatcgatcgcgacgggttcgaccgcgtcgccgtcgctgagcggcgtgcacaggtcgcgcagttcgccattgaggcggacggcaatgatgtccttgtcgtccgcgaagagctcgacgccggtggtggttgcttccacctccttcgcctcgccgttgactgtgatggagatggagcttagcgccatgatgtgtcctttgctatcggggcccgcgttaccaatgtgcaggcctggactggtaatcaacagtggcaacgataggaacccgcgcagacaatgcctcgttcatgctccgcggccggggccgccgggcatgcgaacggggccgtcgccgcggttcccgatcatggggagaaccatggcgacggccccggcaacgtaccttggaggcggagtatcagtccttctttctggaaggcttgatgccgcattgttcctcaccggtgccctccagcgcggaggctggagagaagttcagcaggttggcggaggaggcgcccttcacggcaccgagaccggagggcttgcctgccgccggcgcttcgacgggtgccttggcttccggttgcgcggccgcgacggcgtcctcgtcctcgctggcgtcctcatcctcgaactccttgcgtccatagtagaggtccttgtcgaggtccttctcggtggcggccacgatcaccgccgtgttggcggcaccggccacgttgagggcggtgcggcccatatcgacgatctgcgagatcggctggctgatcgcgatgaacgggatcggcagaccggccgccgcgaacagcgaggtcgcggtgatcgtcgcggtgccgggcacgcccactgtgccgatggacacaagcagggcgagcaccaccaggaacaggaactgggcgggcgagtacgaaattccctgggcgttcactgcgaacacagcgagcagcacgggccacacgccggcgcatccaggcatgccgaggttcgcgccaagactggcaacgaaggacgcgatatcgccaggtacgccgctggagcgcaggttgcgcacggtcacgggaatcgtgccgatgctgctttcggaggtgaacgccaccacgccggtgggccagtacgccttgaagaacggaatcgggctcaggcgcgtcgtgacggacaggatgagcggctgcacgacgaacagctgcaggatcatcgcgacgtacgcgaccacgagcacggtgaccagcggtagcagtgccgccacatcactgttgctcacagcggcggcgatcagcgcgagcaccgcgtacggcgtgaatccgacaacgatctgcgtggccttggacagcactacgttgccggcatccacgaacgccttgaacggtttgacggccgcggcgcccttggcggtcttggcggcggagttgtaggcgacggccacgaggatcgcgaagatcaccacgggcacgacctgattggaataccagttctggacgaggttcgtcgggaacagcgccacaatcgtgtcgagcacagcgggcacctcgcgctgctggtagtcggtgggcagcgtgaacttgaagccctcgcccacgcggaacagcagggccaatcccagcgtgatcagcgcggcggtaaacgtattgatgagcaggaacaccacggtcttgataccgatgttcctcagcttgagcgattctcccagattggtgatcgccgcgatcacgctgaacagcagcaacggcaccacaatagccgcgatcgcgttcgaccatacgctgccgaacgccgccacatagtcggtatgtcccttgaacgcgataccgaccacaatgcccagtacggtcgcgatcagcacgcggacgctgaatcccgctttcttcctgatactcagataagccaaacccgcaaacagcacaacagtggcacccagcgccacccaattccatgccgtatcggacatgtcatctcctttcgtgtcatgacgacgcgacgcctgatacaggtgcggcaccgctcttgattccatcgattcaccgtacagtagcggacgaaacaacatttcggaagtgctatcggttttttcgataagggcttaacagtaccgcttcaaagttgggagcagaggactgcggcaattacctaaatgactgaagctcttacgccggtaggtgaaacgcgaagcgagcagcggggtattgtacgggcgctgaaaacaccgtatccgaagccccatagaccagagcggattgatggagcggacaacgggactcgaacccgcggtctcaaccttggcaaggttgcgctttaccaactaagctatgtccgcagtataccgatacaagaccggcatcgtgggtgatgtaggaatcgaacctacgaccccttccgtgtgaaggaagtgcgctagccgctgcgccaatcacccgcaaacaacaaatgttcattttacgtgacatcatcggcgagcgcaaccattacggcgagtcgccatgcagtccgcggctacgacgaaagcacatgacttgaacaacgcagaccgacacgcgataatcgacgcaacgggggcaaaggagacgtcatgaccgaacagcagccgcaggaaccctatggcgatccgcaatacgagtcatacagggaaggcacgccgaccgagtcagtgccgaccatatcaatgccgaccgagtcgatacccaccacaggcgcgtcgggcccgacaggagcatcacggcagcgccaggcaccacaaccgcacaccccatacggattctcttcagccacgcggcctcccacatccgggccgtatgcgcccggccctttcccgcctcctgaagcccatgcgacacagggctcatacgaagcgcccagcccatggtccaggacgcccaacggcgcatcatcgtcggcatcatccccattcaccacgggccaaacaaatcgtcaggcccatcccccgtaccagccgtacccgatgccgccataccagcagtaccgcccgatgcagcccccgaggaaaacgggcatcggggcgggcggcatcacggcgatagtcgccgccgtaatcgtcatacccgcgctgctgttcatcgccgtgaccgccgggctcatgacggtggcgaagaaccatatcagccaaggtgccaacgagcccaccaacagctacggcaacgcgtctccctccgacccgaatcaggccgaccccgagccgaccgccaccgtctaccgcatggacgagtggcccggatacgagagcatggtgacctacgtgaccgacaaactcgatcattacaaggacgagatactcaacaacaacaccatgttcatgagcgaataccggatacccgacacgcaggacggcaccgactacatgacgggatacatggcggcgttgctgggcaccgtgaacgaggccaaggcggcagcggacgagaccagcgaggaccccgatgcgctggatgcgaagatcgactcgtaccgaaccaccgtcgacacccttgaagcacggtttaagaaagggcaggcgctcggcgtttcgatgaccgttaccggcaacgatggcaagaagtacacggtcgacggcagcaaatcaatcacgctcaggcctacctgggacgagctggaacagcgcgtcgccaaagcctcgaactcgctggggagtggcaacgccgccagcgcgcagaaactggtggagctcgcggacatgaagctcagctgggacatcgacgagggattcagacagtgcccggcgtttgcgggcaccgacgacggcgacaacaaggcgctgacgaagtccgagacgttcggcttctactgccctgccacgccgaacgtgatctatggcaaccgcagcatgcccgactggaacatgacctacgcgccggccgcgggcgtgaggcacgagttgtcccaccacgccatccacatgcgctgcggcaccatcgagcccgaggccgtcatgcagaacggcgtgaaccgcaccgaaggcgtgacgaacagctacgcggtcaagtacatgggcgcgaaccgcgccctgatccagcagagcatcgattacgcggccagcaccgggcacaagcagtatcgcatggatgcgttcaccgaccgggctgcggaacgcatccactccgggcaatgcaacgcgggatgagcaatcgggcggggttctggagtctaattgcgtttcgagggggtgcttcaggctcgttcggacatctatctgcgtttcgaggggttggtgcccgagtagagccgggccggaaaccgcatgattccaatgagggatgtccccgcatactccggatatcgcgtttgggcaaccccttgaaacgcagatagatgttccgagagcgcgaaatcaacccctcgaagcgaagataccgggtatcagcctgccagcggaggcaatgaggcacggtaaaaacgggttataagcgaaaacacccgaaagcgctacatacaagaggaatatggtgggcgatacaagattcgaacttgtgaccccttccgtgtcagggaagtgcgctacctctgcgccaaccgcccgggtctgtaccatttgacggaaaccatcatgttacggattccatgcaaacgagaggtgggtacgagagtcgaactcgtctatacggctttgcaggccgctgcctaaccgcttggctaacccaccgcaaaggtcgtcaactcttcggaccttagagcggacaacgggactcgaacccgcggtctcaaccttggcaaggttgcgctttaccaactaagctatgtccgcgtttccttgaccagcgtcatgccgtcaagcaacagatagcaactatagtgacaaccatgggatttgccaaatccggcgtgtcgcgcgatgtcacggcctgcgaccgatcacccacaggccttgctataccgcgattctctgatggcataagccgcctgcaccaactgcgaggaaccgttacattagttgatatgagtgaagaagcgaaagcgcatgaaccggtgatgattgccgcattcgaaggctggaacgacgcatgccaggcagccaccaacgtcatccggcatctcgtgtcgcgctacgattcacgcgagatccgccacatccgctgcgatgggtactacgactaccaggtcgcgcgcccgatgctgtgcaaggtgacgggccgacgccggatcctatggccgcagacgacgttctacgccatcgacgtggcgccctcgacgaccctgtatgcgcagatcgcgcccgagcccaactaccgttggaacgactactgccgtcaaagcatgcgcatcgccgaggagcttgacgtccgccatatcgtgaccatgggcgccatgttcgccgactgcccgcacacgcgcgcgctgccgctcgacatcagcgaccagcagtgtcagtgcgacatggaccgggaatacagcggccctgtcggcatcccgaccgtgctggattgcatggcatgcgaggagggattctcgaccacgtcgatgtgggtgtccgtcccgcaatacctcggcagcgacgaatgcgcgcaggccaccatgcagatgctcgcggcattgtccgaccgcatcggcgtcgagctggatccgggcgacctcgccggcaaggccgaacagtggaaggcgcaggcttcggtgctgacgcgctgcaacgacgacctcgcccaatacgtgaaacaccttgagcatgattacgacatgcaggagaaagccgatcaggtggcgcgcttcggcgctccggccgcggaacagctggtgcgcgaggcggaggccttcctgcgcagtcgcggcaagtgacgcgggccgcataatctcacggcaacgcaaatggcgtccgttccgcgaagccgcgaaccggacgccatccaagcgtgtttcgtgacgttacagcgatgactgcaacgtcaccctgccgccgtcatctgaccgcggctgcggattgctccacggtgacgatgctgaccggattgacgacgctggccgcgctggcggccttcaccggctcatacggcttcagggcgccgaacagcagcagcagcgcgacgatcaccgacaggccgatgcgatagatggagaacgccttgtacgagaacgtggagacgaacttcaggaacccgatgatgacgatgtagccgagcaggaagctgatgatcatcgcgatgatggtcggaatccagccggggaacatgcgatcggtcccggcgttcttcacggccttgaccgcttcgagcaggccggagccgaacaccgcggggatggccatgaggaagctcaggcgcacggccgattcgcgcgtgtatcccagcgcacggccgacggtgatggtgccgccggagcgggacacgccggggatgagcgccatcgactggccgaggccgaacaggaaggcgtcgcgatagttcatgtcgtccatggtcttgatctgccgggagcgggcgtccacgatccacagcagcagaccgaacaggaacagcacggtaacggtgatccacaggttgcgcagcgacgtctcgatgatgttctgcagcgtgaagccgaggatgatgatcggaatcgagccgacgatgacgttccatccgagcgtcgcgtacttgtcgccgcgacccatgcgcgcacgccagtccgggccgttcttgccgaacaggcatccgaaccagtgcgacaggatgttgatgatgtcacgacggaaatacaggatcaccgcgagctcggtgccgatctggatgatggcggtgaatgccgcgccgggatccgcgcccagcatcagatctccgatgatgcggatatgcgcgctggacgacaccggaagatactcggtgagcgcctgcacgattcccagaataatcgcttggaagaaattcatgatccctcttgaatgattgtccgtcctttaccgtggacaagggtactcagcgtcccctaagaatgtgtcaaacatcgtattgtcgtacagaaaacccacaatgaggggtggatagtcgggacgtcacggggaggaattatggcacgataccgcaagtcaaggatgtgggcgccgcagggctttttcgagtgcgagggccgcggcctgcaatggctcggcgaggcgcaggcgcagggcggaccccgcgtggtggacgtctacgaatggggcaaggattttctcgacatcgaacgcgtatccccctgctcccccacggccaaggcggcccacgatttcggcgcggccctggcgcggatgcatgacgcggggacggaccacttcggctcggctccggccggatatgacggcacctgctatttcgggccgctgcaggatccggtgccgatggcgaccggcgcgtgggatgacccgatcacctatttcgcgcaggggcggctggtcccgatggtcgaactgggcatgcgtcgcggagagctgacccaggccgacatggacctgacgaaccgcgtcatcgacgcgatgcccgaccttctggggcgtgcggcgcaggacaagccggcacgagtgcacggtgacctgtggagcggcaacgtgatgtgggccgacgaccgaggctcgtgcgaggccgtgctgatcgacccggccgcacacggcggtcatcgcgaggaggatctcgcgatgctgcacctgttcggcatgagctatctgaccgagatcatggacggttaccagagcgtgcatccgctgaaggccggatggcaggagcgcacgacgctgtggcaactgtatccgatcgccgggcactgcgtgttcttcggcggcgggtacatcagcgaataccgttccatgtgccgctcgctgctcaagtagcaggagcccgcaacaagaggcatatgtacgggaaagggctttcagaccagagtgtctgaaagcccttttcaatgccgaagccgctgatcggcgcgaatgacgagcgctgccgagcatggacgagcatagccgaattcagctcagcgcgtccttcaacttactgaaaaaccccttgcgctggctgccggtggcggggcgcgagctctgcgcgacgtgcgacgccgaggcgtcgtggctggccgcgaactgctcgatgagcgaacgctccgagtcggtcagcttggtcgggatgtgcacgttgacatgggcgacgagatcgccgcgctcgccggattggcgcagcttggtgacgcccaggttcttcaggacaatcgtctcctcgggctggcatccggccggcacggtcaccttctgcttgccgtcgaaggtgtcgatctccatgtcgtgacccaatgcggcccagctcatcggcacctgaatccagcaatgcaggtcgtcgccgctgcgggtgaagcgcttgtcggccttgatgcgcacgtcgacgtacaagtcgccggccgcgccgccgccttcaccgacctcgccctgatgggcgaggcgtatgcgcgattcgtccgcgatgccagcgggaaccgagatccccacctcgcgcgatgtccggacgccgcggtgccccatgcaggacgggcaggggtcggagatcaccgttccgtgcccctcgcaccgctcgcagggcgcggaggtcatcatctggccgagcatcgtgcgcacgaccttctgccggaacccctggccgtggcagtccgggcaggtggtgggctgagaaccgttggcggtgcccgagcccccgcactgctggcacagaccgaaagtattgatcttgatgtgcgtggtgccgccgaagaccgccgtcttaagatcgatggtggcgctcgccagcgcgtcgcgacccggctgggtgcggggaacggggccctgcgagccgccgctgaacgctcctccgaagaactggccgaagatgtcggacatgtcacccatgccgaatcccgatgcgccgccgaatccgcccgcattggggtcgttggggtccacgccggaatcgtacatgcggcgcttgtcggggtcggagagcaccgcgtaggcgttgttcacttccttgaacttgtcttcgtattcggggccggcgatatcgggatgatacttgcggctcatcttgcgatacgcttttttgatctcatcgtcgctggccgacttgtcgacgcccagcacctcgtagtaatctgccactgctcgttctttcttgttggtgttcggggagctattgtgccataaggctcagtcagttgccgtcgccgtcatcgtacgacgatatcgcacgggtcaggtaccgggccacggcacgtacggcggctatggtcgcggcatagtccatgtgcgtcggtccgatggagccgacgaaggccaccggcccgctggattcgcccgacccgcccgacccgccgtcgagagatggcatcgcgacgctatcgccatcgtccattttgccgggctccgcgtcggcgtcatccgttatgcggagctccctcgccatgccggtctgagccgtattggcatgcgccgcgccgccaagcgcggatccaccgccgtcttcatgtcccgcgtccgattccgccggttccgtccgggatgccggcgagtttccgtagccgctggtgaccaccgaagcatgcagcaattccggcgtgtgcgtctccgaaccaatggctacaccgaccccataggcgtcggtgtcctccgaaagcgcgctcatgagtttcatcagcacgatctgctcctccagcgcgtcgaacagcggcgccatgtcggcgatgtcacgccgatgggccaggtgcgacgcgccggccatatacagttcactggacctttcgttgtctcccatcgcctcgaacacctgcgccagcccttcaagcagcgcaacggattcccgccgcgacgacttgagggaacggacccgttcggcagcctgcgcgaaggtgagcccgaggcaggctccgttcacgacggatcccacgtcggcgagcgtgatatccgtcggctggggcgacagggcgagcgtatgctgtgcgacgttgccggcgtcggtgatgaccacgatcagcagcaacgtggatgagacggggacgatctgcacgcgcagcaccttcgccttggccggggacggggaggcgaccacggccacctgaccggttatgtgggaaagcagtctggccgcgcgctgcaacgtgtcctgcaggctgacggatccggacaggaacgccgcgattcccttgcgctgcgcgtcggagagggggacgacggtggacaggcggtccacgaagtaccggtagcccttctccgtcgggatgcggcccgaggacgtgtggggctggatgagatacccctcttcctcgagggacgccatgtcgttgcggatggtcgccgagctgacgccgaggtcgtgcttcttcgtcagagcggccgatcctatcggctcctgggatcgaatgtaatcctccacgatggcgcgaagcaccaccatgcgtcgtggttgcgccatgtctcctcctgttcttccccggcattcacgccttcacggctttcccgtattcacgacacgcccgacactcccggagtgggtcggtcgaacgatgacgtacccagtattagcactctttgcccttgagtgctaacgcgttcgttatcagatgatttcatgacgcagccgccggcatgagtcagtcacaagttgtgagcgctaacataacataatctaccaaaacacgccaaaagcgaaccactaagtctgttcacaacgttagtatgggattgcaatgtgagggcatgcatggcgcggcataagccgaaatgcgtggtgcccgaagtattggaaggaaagtacatccatgaccgaattcaaggagaccgagctggacgagcgcgccatcaacatggccaaggtcctgtcggccgacgcggttgagaaggctggaagcggccaccccggttcccccgtctccctggcgcccgtcgcctacaccctctaccagcatttcatcaagcatgatccgaacgaccccaactgggaaggccgcgatcgcttcatcctttctggtggccacgcttcgctcacccagtacgtccagctgtacttctccggctacggcgtcactctggacgacctcaagcacttccgcggcggcgcggacacccgcaccccgggccaccccgagtacggtctgaccccaggcatcgaaatgaccaccggcccgctgggtcagggctttgcctccgccatcggcttcgcctacggcgaacgcttccagcgcggcctgctcgacccggagaccccgaaggaagagtccccgttctaccacaagatctgggccatctgcggtgaaggcgacatcgaggaaggcatctccggcgaagccgccgctcttgccgccaaccagaagctcggcaacatcaccgtaatcttcgatgccaaccgcatccagatcgaaggcgacaccaacctggtgctggccgaggacgtgctcaagcgcttccaggcctacggctggtacaccgacgaattcagcttcatccagcccgacggctcctacaaggaggacatcgagggtctggccgaggtcatcgccaaggccgagaaggccgcgcctgaccagccgaagctcatcaaggtccactccctgatcgcatggccgaccccgggcaagaccaacgacccgtcctcccatggctccaagctgggcgccgaagccgtcgccggcctcaagaagctgctcggttacgaccccgaagagtccttccacgttgacgaggaagccctcgcccacgcccgcaaggtcgcagagcgcggtctggaagcccacaaggaatgggacgagaagttcgacgcctggcgcaaggccaacccggacaaggccgccctgtacgaccgtctgaaggccggcgagctgccggaaggcttcgacaaggccctcgacgatcttgaggccaccttcgaggtcggcaagaaggtcgccacccgtggcgcctccggctccgtcctcaacgccatcgcggccgtcatgccggaactgtggggtggctccgccgacctcggcggctccaacaagaccgacctcaagggcgctgccaccttcgctcctgcggagtgcgccaccaagcagtggccggtctgcaacgagttcggacgtcagctgcacttcggcgtgcgcgagttcacgatgggctgcatcaccaacggcatcctgctgggctcccacacccgtccgttcggcggcaccttcttcatgttctccgactacgagcgctccgccgtccgtctggccgccctcatggagatcccgaacctgtacgtgtggacgcacgactccgtcgccgtcggtgaggacggcccgacccaccagccggtcgagcaccttgcctccttccgcgccatcccgcagcttgaggtcatccgcccggctgacgccttcgagaccgccgaggcctaccgctacttcttcgagaagaagaacacgctgcccggcgccatggtgctgacccgtcagggcgtcccggtgctcgccgagaccgccgccaaggccaaggacggcgtgcgcaagggcgcttacgtcctggtcgacaccgagggcaccccggacgtcatcctcatggcttccggctccgaggtccagtgggccgtcgacgccgcgaagaccctggccggtgagggcgtcaaggctcgcgtcgtgtccatgccgtccatggaatggttcgaggagcaggacgccgagtacaaggaagctgtgcttcccgcttccgtcaaggcccgcgtgtccgtcgaggccggcgtggcgatgccgtggtacaagtacctcggctcctacggcaagcccgtctccatcgaacagttcggtctgcagggcgatggcgcgcagaacatgatcgacctcggcatcaccgccgagcacgtggtcgaggccgccaaggcgtccatcgcggaagccgaagccgccaagtgatccatcgggagccgcccgccgaggcgaatacgcgtcgggcggctccctcccggtcggcacggccgacaagcccctcgcgggaggggtgccattgaagatttgttccattacggaatcaaaggagaaaacaatatgactgaagcaactcagcgcacgtccgacaacggcgtctcgatctggctggacgacctgtcccgcacccgtatcgagtccggctccctgcaggagctcatcaaggacaagaacgtcgtcggtgtgaccaccaacccgtccatcttccagaaggctctgagccaggtcggcccgtacgacgcccagctcaaggaactcggcaaggtcgacgtcgagaccgccgtgcgcgagctcaccaccaccgatgtgcgcaacgccaccgacatcttccgcgagatcgccgaggccaccgacttcgtcgacggccgtgtctccatcgaggtcgacccgcgtctggcccacgacaccgagaacaccgagaagcaggctgtcgagctgtgggagaaggtcaaccgcccgaacgcgatgatcaagatcccggcgaccctggaaggcctgccggccatcaccgccaccctcgccaagggcatctccgtcaacgtcaccctgatcttctcgctggagcgctacgagcaggtcatcgacgcctacatcgagggcatcgcccaggctgccgccaacggccacgacctgaagcacatcggctccgtcgcctccttcttcgtctcccgcgtggacaccgcggtcgacaagctgcttgaagccaacggctccgatgaggccaaggcccttgagggcaaggccgctgtcgccaacgcccgcctcgcctacgagctctttgagaagaagttcgccgccgatcctcgctgggctgacctggccgccaagggcgccaaggtccagcgtccgctgtgggcctccaccggcaccaagaacgccgcctactccgactgcaagtacgtcgacgagctcgttgccaagcacatcgtcaacacgatgcccgagaagaccctgaacgctctggccgatcacggcaacggcgctccgtccatcgagggcacctacgaggagtcccacgccgtcatcgacaagctggccgagctgggcatcaacctcaaggacgtcaccgacaagctggaggccgacggtgtcgccgccttcatcaagtcctgggattccgtgctggccgacgtgcagtccggcatcgaccgcgtgaacgcctgagaccgaccggtcaagcgtgacatacgcctgaccacataatcgtgagaagcccccgacccgataacggccgggggcttctcacgtgatacactgctagaccgcacacgaacgccatgtcgaaaccgggaaaggccgtgaatgacgccccttcgtgtatcatgccgaagggtatttctctcgccgcgaacatgcgccagcgcatcactcaagcagaaactacaaacagaaggaccgtcaaccacatgaacttgcatctggcagaggcaggacgcacgctgattccccgcaaggatgacgaatacgggctgctctcccccgccatggtgctgatgacgttcatcgccggtctggtcgatgcactgagctacttggccttgggacatgtgttcgtggcgaacgtcaccggcaacatcgtcttccttggcttcgcgctcgcccacgcacaggggttcgtctggtggacatcggcgctgacattggtgtgcttcgccttcggcgcgttcatcggaggccgcatcatacgccggttcggagaacaccgggcccgccatctgctgatctcgtcgatcgtgcaggccgcgttcatcctcgccgcgctgatcgggctgtacctgctgaaccactattccgcggaaccggctctgggcatgggcagtatacaggtgtcatcgcagccgagcctcaacttccccaccgcccgccacatcgacgtccatcatctgatgctgatcgtgctgatcgcccccgcgatgggcatccagaactccactgcccggcggctcgcggtgcccgacctgccgacgaccgtgctgacgatgaccgtgaccggcatcgtcgccgacacatccgcccacggccatgagatgtcaaaactcggccggcgcgccgtcgccgtattggccatgtttctcggagcgctgacgggcgcggcgctacagtcgaaaggacatgaggacatcatcctcatggtcgctctggcttgtctgctggccgtgatcggcatgatgctcgcgcacgcgcattccacggcggcatgggcgaccgcccgccactgacctattccccaacgcacagcaatgtgttaaactgcgctgccatgggcttatcacgggtcgggccacccgacgcgggtggattcatgccgaccgccgggaaccgagtccgaaacaggtgccgagaagacaggcgccgaggacaggtgccgaggacaggcgccgagaagacaggcgccgagaagacaggcgccgagccgccgcaacagaaagcagtaccgttatggcaacgactcccataccaacagacatcaacaccgccgaatccggcggtcggcgccgtctcccgttctccggacgcctcgtcatggcgttcacgttcttctcgatgttcttcggtgcgggcaacctcatctttcccccgttcgttggggcgcaggcgggcgctgccaccgttcccgccatcatcgggttcatcgtctcggcggtcggccttccgattctcggcgtgctcgccgtcacgttcgcgggtggcttcgacgagctcgcccgtcgtgtgtccccggcgttcgcctcgctgctcggcgtggcgatcatgctcaccatcggcccgtgcttcgccatcccacgcacggcgaccacgtcatacgagatgatggtggcgccattcctgccctcccgcactggatggggcggctggacgacgcagctggcgtactcgctggtgttcttcgccgtggctttcctgctggcccagcatcccgagaaactgtcggccgtgttgggacggttcatggggccgctgctgttggcgttcatcgcagtgctgttcatagcctgcctggcgcatggtgcggtaacaccgacgcaaccgacaggcgattatgcggtgcatcaggcgtcccggggcttcctggacggctatcaaaccatggatctgctagctgctttgtacttcggcatcgtgatttcggcgaacgtccgcgccatgcatgtcaccgacaacacgcttattcgtcgggagaccgcgtacgccggtctcggcaccgggatcctgctgatcgtgatctatgcggtgctcggctatgtgggtgtcgtgtccgggagcattgcttcggtcaatccagcgaccgatacaggcgcgaccgtactcaccaatctcacggcctcgttgttcggcacgttcggcatggtatttttgggcatcgtgttcgtcatcgcctgtctgaatgtctgcacgggtctgatctgcacgtgcgccacatacttccacacgcgattcgccaccgtcgccggtcgccgcgtgagctatcgcgcatggcaggcactgttcaccgtgttcagtttcgtggtgtccaacgccggactcagcatgatcatcaaggtgtccgtgcccgtgctcgccgcattgtatccgattgccatcgtgttggtgacgctcgcattgacccatcgaatcctcgccgttcatttcccgcgcgtgtacttctggatggtactgctggtggccatcgtgtcattcgccacatgtctggcgagcatcgtcacggtattcggcggctccctgccatggctagaggccatattgaacatgctgccgctgcagcaatttcaactgggatggatcattccggcgctggcaggcttgctcatcggcgtgcttgacagtgctgcacattcgtcgttcaaacgatgaccgactgattcgagggctatcttcgtttcgaggggttgattgaggctcgctcagacatctaactgcgtttcgaggggttggtgcccgagtataaacaccatgggaatcgcatgattccaatgctgaacaccccgatatactccgggtaccgcattcaggcaaccccttgaaacgcagatagatgttccgggacgccggaatcaacccctcgaaatcgagataggagatggaacgggctaatgaggcgcgtaggacgactggggtggtcatcacaaactacgctacggcgtccgacactccttgaaggccgtgtcatcgtatcgccggataccttgggtcagattagagagctggtaggttccatcgtccgttttggcgagcaggacaatgatcttggtctccgcaccatatttcgcgatgaaatcgtccttggcgcccgctccttcgcatccaagattgacggtgaccgtgatatcactaccttccacagaccccttgagacgcgtccagatttcagcgtcatgtcatacagatcctgttggtcgccatcggcttgcttcatcctgtcaatcgtggcaacggtgactatccgatgcagcgacggcatcgctgagattgccgtactgcacgccggcgtcacaggccacggaaacgacccgaccgccgcatccggcaaaaaccagtatcatggctaagaccgccagtattgccggaacccgcatcctcgtctgatgatatgaacgcatcgtcatcatgtctccttcgacatcaagccggcgctcgcccggtccgggcgctcccgcctccttcccatgacaccattgcacgaacatgcccccccaatgagcattggcagccggcaatacggcgggcgccgccttcaccggttcttggcatcatccgcgatcctgccccgtgtcagcgaacggtaggtgacgtagaacaggatgcccgcgacgatgccggaagtcgcgtcggagatcggctcggcgaggaagatgccggtcactccgatccagtgaggcagtgtcagggcgagcggcaccagcatgatgatcttgcggaagatcgccaggaacacggactgcttggcctgccccatgccgacaagggcgcactgcgcgcccatctggatgccgaacacgccccatccggcgacgaagaccggcatcatgcgggtcacgatgccgatgacttccggcgacgacgtgaaccatgcggcgaacacgcttgggaatgcggcaagaatcgacaccagtaccgtggccgaagtgatctgcgcgatgaatgccacgcggatggcctgccgcacgcgatccatgcgccgggcaccgaagttgaacccgatgatcggctggatgccctgctggaaaccgttggtcagcacactgaccacctgcatgagcgaggtgatgatggtcatcgacgtgacatagtcgtcaccgccgtatcgttgcagcccgacgttgaacaccacgttgatgaggcattcggtgatctgcatgatgaacggcgccaacccgagggtcaggatcggcacgatgactcgattgaagcggatgttggacggcctcaaccggatggcgctgcgcccggaggcgaggaacaggatgatccacaccgatgagatcaactgggcgatcacgttcgcgacggccgcgccctttacgccccagccgagcacgaagatgaacaccgggtcgaggatgatgctggtgccggtgccgatcagcaccgaggtcatcgcgatggtggtcttgccctgcgcggagatgaagttgttgagtccgagtgtgagctgcacgaacaccgtgccgaccaggtagatggtgatgaagtcgaccgcatatccgatgtcggcatcgctggctccgaaagcgcgcagcaccggctccttcgtcgcctgcaggatgacggtgagcgtcagggcgatggccacgaggaacgccgcgctggtgcctaggatgcgttcggccttcttgaaattgccgcgacccagttcgatggacgccctcggcgcgccgcccgcgccgatcagcgacgcgaacgcggtgacggccagcaggatcgggaagcagatgccgacaccggtcatcgcggcgtcgccgacctcggggatatgcccgatgaacagtcggtcgatgatggtgtatgaggcgttcgccgcctgcgcgacgatggtcggaaccgacatcgtcagggcgagccgcgcgaccggtttcgtgccgagcccggagctgtccgccgtcatgccagcagatgccgttcgatccattgcgcgacgccgtcatcgttgttgggcgggcagatctcgtcggcgatcttgatgacctcggggttcgcgttggcgaccgccacgcccgtttccgatgtcgtcatcatgccgatgtcgataaggtcatcgccgaaactgacggtaccgtcgagccgcacgtccatgcgttcgcacagcgtcttcaacgcctgccgcttgttcgcgagcggattcatcagcatccacatcgagccttcggagatcgccacgtcgaaatcgggcgggaccagcgtcttcagatgtgcccattgctccgacttggggaagataatgatcttgtcggcgataccgtcggggacgtcggtgaaatcggtgaattgccaagtctgtgtcttccagtacacgctcacgtcgaagttcgtgtagcgcacgtcatccatgacgatgccgaggctgaggccgggtatctcgtcgagcagataccggcacacctcgcaggcccgtgtggaggagaagccgaccttcagcagatgcccgtcggaggggagccgtcccgaggtgagcagatcgtaatcggaacgttcgggcgcgaaatcaatcagggcaccgttgagataaatgtacgcgtcgaccggcaacttacccgcgtactcgaagccggtgctcaccggccgggcggtcgccaccgcgaaccggtaaccggcatcgtgcatgcgtttgactgtgtcaatgctgcgctgcgtgataaaccgctcctcgaaggtgggggcgtcatgcagcagtgtgccgtcgaggtcggtgacgatgagtcgctgttcagggttggtcatggcgtttctccgtaaagcctgtcaggggggaaaaagaatcatgccggtctgcggctacagcagcccttcgcagtaggagcggaccagctccgcggaatgatgcagcttggcgagctcgtcgtcggcaagttccagctcgacaatctcgttggcgccgttggcacgcagctcggtcggcacaccgaggaacacgtcgcgctcgccgtattcgccgtcgagcagggtcgataccggcacgatgcggcgttcgtcccaaaggatggtctgcacgatgccggccaccgtcgaggcgatgccgaagttcgtgccgcccttcgccgcgacaatctcgttgcctcgcgaacgggtcttctcttcgatctcatgcgtggagacggatgagaatcggtcggcgttgtcgctcaggaatcgcgtgaacggcttgccgccgagcgagacggtcgaccatgcggtgaactgcgaatcgccgtgctcgcccatcacgaaaccgccgacgttgcgcggatccagcccggtctcctcaccgatgatggtcttgagacgcgaggtgtccagcgcggttcccgtgcccagcacctgggtgcgcggcaggccggagcgtttccacgcgtaccatgccatgacgtcgaccgggttggagaccatgacgatgacgccgttgaacccggatgccatgacccggtcgaccacgtcgccgacgagtccgatggtgaagccgagttcgtcgagtcgggttgagttggccggtggcttgcgtccgacggtgatgacgacgatgtcggcgtccttgcagtcaccgtagtcaccgttgcgcaccttgacgtgccggtcctggaattcgctgccgtcatcgagatcatggctttcgccgagcgccttgccggcggaatgatcgatgagtacgagctcgttgcacagaccatgggtgacaatggcgaacgccgcggtggatccgacctgcccggtgccggcgatgacaactttgttcctgttcatggtgaccatgtcagatgctcctcaaacgatatccgataaacgttgcccaatgaaatgagccatgatcaagtgaccatggctcaacgtgctgcatacagtgcttcagcgaatcgcgctcacaccaagttgaattttgtcatcaggccgagggcgatgatgatggcgacccagaccagtgcgatgaagatggtccagcggttcaggttcttctccgcgacaccagacgtgccggcgttctgggtcaggccaccgccgaacatatcggacagaccgccgcccttgcccttgtgcatgaggatgagcagcgtcagcaggatggacgcgatgacgacgatgatctcaagaacgatcttcagaatatgcacggggaaacctccattaaacgtactgtgtcatagcatagcgcagggcattgaaaaacgtgcggatatgcgcatgtttccctatcgacgtgtcgccttgagtgtcaaccgggcgatcttcgccaattcgccggggtcgagcgacgcgccgccgatcaggaatccatcgacatccggctcgccgatcagatgcgtcgcgttcttggacgacaccgatccgccgtataggatgcgcacagtatcggcgacggcggggccgaacatctcgccgaggtcgtcgcggatggctttggcggcctgctgggcggtgtccggagtggcgaccatgccggtgccgatcgcccagaccggctcgtacgcgatgatgagcttcgcggcctccttgtcggaaaggtcacgggtcacgtcatgcacctgtccgacggcgaagtcgagctcgatgccctggcggcgttcctcgaagctttctccgacgcacagtatcggctgcatgccggccgccaatacggcacgcacctgatcgacaatgttgacgtcgtcttcgggatggtatttgcggcgttcggaatgcccgacgatgacgtacgagcagccgaggtgcgcgatcatgtcagcggagacatcgccggtgaacgcaccctgtgtggtcaccgacacggcctgcgcgccgtagcggatcttgagcttatcggcttcgaccagcacctggacgctgcgcagcgacgtgaacgacggcatcagggctatttcgcagcgggagtagtcgaagcgtgcgtcacgaagcagccatacgagtttctgcacgaaatacgtggcctcaagatggtcgaggttcatcttccaattgcccgcgagcagcgggatgcgtgacgccattgatgtcctttccgtatggagcggctccccggcgtcaagcgcccggggagccgaattgcgggtgaagatcagtcgaggaccttcagccccggcagctccttgccctcaaggaactcaagggaggcgccgccaccggtggagatgtgcgagaagccgtcctccgggaagccgaggttgcgcacggcggaggcggagtcgccaccaccgacgatggtgaatgcgccggccgcggtcgcgtcgacgaggccctgcgccacggccttggtgccggcggcgaactcgggaacctcgaacacgcccatcgggccgttccacacgacggtcttggagtcgacgatcttgtcgtggaagagcttctgggaatccgggccgatgtccaggcccatcttgtcggccgggatggcatcggcggcaacgacctccggggcgaccggggtgtcaccggccgggaagccggcgttgacgaccacgtcggtcggcagcacgagctcgacgccgttcttctcggcggtagcgatgtagcccttgaccttgtcgagctggtcctcttcgagcagggaggtgccgacctcgtagcccttggccttgaggaaggtgaacaccatgccgccgccgatgaccaggcggttggccttgtcgagcaggttctcgatcacgccgagcttgtcggagaccttggagccgccgagcacgacggtgaacgggcgctccgggttctcggtggccttggacagggccttgacttccttctcgaccagcttgcccgcggcggccggcagatcggcggccacatcgtagtcggagccctgggcgcgatggaccacgccgaagccgtcggagacgaagacctcgccgagggcggcgaccttcttggcgtacggggcgcgcacggtgggatccttgctggtctcctccgggttgaagcgaacgttctccagcagcaccacgtcgccgtcgttcatcgcggcgaccttggcctgggcatcctcgccgtaggtgtccttggccagcgggacctcgacgccgagcagctcgcccagacgcttggcgaccggggccagagacagctcagggacgaccttgcccttcggacggccgaggtgggccatcaggatgaccttggcgccttcttcgcgaagcgccgtgatagtcggcagcgcggccttgatacggccatcatcggtaatcgtggtgccgtccagcgggacgttgaaatcggcgcgcatcagaacgcgcttgcccttgagatctccgagatccttgagtgtcttcatgtgtatcctttcctatccgcatatgcgaggaatggccggttttagccaattcgaatattacaagcggcacggaacaaaacaccgcgcccatagcgaacatggacgcggtgcatgacgggatttgattccggcgcttctcaggagcagagggacgccgtcagcgtccgacggacgcgccggactgttcccggtcgcgggtcttcgcggtcttgtcggcgagctgtagcagacggcggatgcggcctgcgatggcatctttggtgatgggcgggtcggcgagacgtccgagttcctcaaggctcgcatccccgtgctcaaggcgcagctggcccgcggcacgaaggttttcggggatgtcgtcgccgagaatctcgaatgcgcggcgcactttctcgctggcttcggcagcggccttcgcgctgcggcgcatgttggcgtcgtcgaagttcgccagacggttcgccttgccccgtgcctcgccgtcggtgcgcttgcctgtccactcccttgctgagtgcggggcgcccatgaggatgagcatgcgctcgatggcgtcggggtccttgagcgtgatacgctccgaactgcgcagctgtcggggcttcgccgtgatgccgagcctgcgtgcggcgcccgaaagcgcgagggcggcctcgttcgacgggcagatgatttcaaggaagccggctttgcccgggtcggaaagagcgccatgagccaggaaggctccacgccatgcggccttcacctgagcgatgttgccgctgatgatatccgcgggaagtccacgcaccagacgcttgcgccgatcgaggaggccggtctgcaatgccaacgctgcaccgccgcgctccacgtggatcatgtatcgctgcaccgtggcgccgttgggcgtcgagcgagaaacctgggtcatgaccgcctcatgcccatacagatccctgatggtgtcctgaagccactgggcggccttgagcgagtcaaactgcgcttgaacgatgatctggcgctgtaccagccgcagcccgccgccgaaacgaatcatagcggtcgcctgcgcctttttcgccgcaggcaattcgttatcgattgcggccagctcgcttttgacatcatccagaagagccaagagccaacctcctatgtcctgtttcttctcaatgtttccccggcctgctgggttctgctccctgcactgccaccggcttactgtgatacctaatcacttggacaagaatacgcgatgctgccggattatggaaacgaaatgtttgcatagtggctgcacggtctcgctatgcgcgcgcccggtgcagctcgcgggccgatacggtgacggatatgccgtgcgcgcgcagccgcctcgcaagttcctcgctcatgacgacggaacgatgctgcccgcccgtgcatccgatggcgatggtcacgaaatgcttgtcctcgtgagcgtagccttccaacgccacgaggatggcccgctcgtatgcgtccaggaaatcgcccgcgcccggacttgacagcacgtaatcgctgacgggcttgtcttgcccgttgagctctcgtagcgtcggcacccagaatgggttcggcaggaaccgcacgtccgccacgaaatcggcgtccatcggcagcccgtatttgaatccgaagctgaagatgtgcacggccaccgtggacgggccggagccgagcatcgcctcgtatagtttggtcgacagctggtggatgctcagcgaggacgtgtcgatgaccatgtcggcccgttccttgaggttggccagcaggctgcgctcctcaaggatgccgtcgatcagacggtttccacgctgcaggggatggggcctgcgcaccgactcgtaccgcttgatgagcacttcgtcgctggcgtcaaggaacaggatgcgggtgcgcacccccaggtcgtcgagatggctgagcacggctgacaggtcgtcgaaatactcgcgcgaacgcacgtcgatgacggccgcgagcttgtgcacgccgtccttgccggcattggtcatcatgtcgaccagcgggaccagtagtttcggtggcagattgtcgacgacgtaccatcccatgtcctccacgcagtcggcggcatgggagcgaccggcgccggacatgcccgtgatgagcaggacctcgaagtcgtccgcgggctccggcctgttcccgcccgccggcggcacaggcgcgccggccgggctcatggttgcgtgatcgttcattacagtgcctcctcaagggcatgtcgcatcgcgggttccagcacatccatcagggagctgtcggccgtgtccgcgccggtcatgaggatgacctgcaggatggcctgccacagcagcatctcctcgccgccgatcgccagccctcccttggccctccatgcgcggatcaatgcgctggggcgggggtcgtagaccacgtcgagcaggatgccacgcggccggaaggagtcgtcgttcccgatggcttcggcgaccgcgtcggcggcgtggccgggaatcgtgctgatgacgatgtccgcgtcccgcagggtgtcggccgacgcgtcgatcgtcttctcctcgtatgcgatggcgtcgccctcgccgatgatgtctggcagctgccggttcttgcccgggtggcgcgccgccacagtgatgcgtttgttcgtctgcccgttcttcagcatgaccgtgcatgcggcgacggccgaggccgcggtgttgccgttgccgatgacggcggcggaggttgcgctcttccaacggtcaggctccccgagggccttgagctcatggtcgaaggcgagcacgatgcccatgacgtcggtgttgtagaggcggatcgctggcagcgagcccgttgcggaggtgccgtcgggggtggcaccgggggtgatgccaggttcggcgggccagtcgaaaatcgcggtattggcgactttgagacgctgcgcccacatattggacggagtgccatagggctgaatggttttcttgagcggcatggtcaggctcagaccgcgccaggtcggatcaagccctttgagaaatccgtcgagatcgctttcgccgacctcgtgccgctcgtacgcccagtcatccaacccgagcgccttgtatgcggcattgtgcagcaccggcgacaacgaatgggctatcggcttgccgagcacggcgcaacgatgtgcaatcacggtcatacccctccttgctcactgcctatatcattcactgccaccatcgtaccgtaaatgttcttaacaaaatcgtcatagaccaatgaattccgctggcgggatatggacttcgcgccccagcggggacggagtccatggcgccccgctgacggggcggggttcatagaccgccagcgggggcgaacgaggtgtgcggttattcggcgtgaagggcggtgtggatggcttcggctttggcatggcctatgcccttgaccgcttcgagttcctcgacgctggcgtcacgcatcgcacgcactgaaccgaagtggctcagcaggcgcttctggtaggtctcacccacgccgggaatgccatccagcgcggagcgcaacgcgcctttgcgtcgcgtctgacgatgataggtgatggcgaagcggtgcgactcgtcacgcacccgctgcagcaggtacatgccttcggactggcgtttgaggatgatcgggtattcgtcgtccggcacccagacctcttcgagtcgcttcgccagaccgcagacggccacatcgttcacgccgcaatcggccagagccttcgccgcggccatgacctgcggatgtccgccgtcgacgacgaccagattcgggatgtaggcgaaatgatgccggttcgtgttctgctggacgactcccgcgtcccgtatgccgtcaggagacgatgccgtcgtcgtggatgcggatgtatcggacgattcggcacggcgctcgttgtccatgctgtcgccggagtcgccggcgatgttgccgtgtctgaaccgtcgcgtcagcgtctcgtaaagggcgctcagatcgtcgagcgcacccttgccgtcatcaccgcgaatggcgaatctgcggtattcggatttcttggcgatagcgtcctcgaacacgaccatcgaggcgacctggaacgccccgcccacggtgttcgaaatgtcgtagcattctatgcgcagcggtgcctgagcgagcccgagtgccttcgcgacgtcgttcatggccgcggtgcgcgtacccatgtcgctgatgcggctcatcttgctgcgttgcagcgcctgcccggcgttctcgttcgcccggtccatcagcgccttcttctcgccgcggcttgccacgcggatggtgaccacggcgccacgcagcccgctcaaccatgattcgagttctgcacggcgtgccggctcgaccggcacgatgacctcgcgcggcactggggcgattggcgccagcaggtccgcgcgaccggtctgttcctgccgttcgcgtctcgtgcgtgtcgcctgcgcgcgctcgacgctgctcttggccgtcaccgtctgcgtgctgccgatggcgtcgcgtctctccacgatggaggctcccccttcggccgtcgacacgccctcattcccggagagcgaggccatggaagggtccgttccatcatgaggatcgacgttcaatccgttgtcggcggccacgtctgaatacacctgcatgatcaggtcgtcgatgagttcgccgtcggatacgtcctcgacgcgttcgacgctccagttgcgttctccgcgaatcgagccgtcacgcacgatgaaggcgtgcacggacgcctcaagctcgtcggatgccatgccgaacacgtcggcgtccacgtcctgatcgaacacgaccgcgttctgctgcatgacggtctgcagcatctggatttcgtcgcgcagccgcgcggccttctcgaattcgagttcggcgctggcgtccttcatgtcccgcgtcagctgggcgatgtagctcttgccgagccgaccggtcatcacgccgaccagctgctcgcacatgcgccggtgctccttgggcgcgattctcccgatgcatggcgccgagcatttgccaatcgacgcgagcaggcatggtcgcccggtgagttcggccttgtggaacacgctggtcgtgcaggtacgcaccgggaatgtgcgcagcagtttgtccaacgattgtctcagctcccacaccttcgcgtaggggccgaagtagcgggcgtcccttctcttgcggctgcgggtgacccatacgcgaggcacggcctcccccgacgatatcgccagatacgggtaggtcttgtcgtcgcggaactgcacgttgaaacggggatcgaactccttgatccacgtgtattcgagagtgagcgcctccagttcggtgccgacgaccgtccattcgaggctacgtgcggtgagcaccatcgtctgcgtgcgcggatgcagcagatacagcggctggaagtagttggtcaaccggttgcgcaggcttttcgccttgccgacgtagatcacgcgtccttcgccgtcccgccatttgtagactccgggctgggcggggatatctccggtcttcggccggaacaggtcgcgcgtgtcccccagcagcggagccccgttcctgttcactttggcgaccgcatccgaagcgtccgcctccccgcgcagcgaatcggccgcttttctccacacttcgggtgaatgccgctcgatatcgttcgtcacagcatgtccttgaggaacttgcccgtccaggacgcttcgcattgcgccacctgttcgggtgtgccctgcgtgacaatcgtgccgccgccgtcgcctccttccgggcccaaatcgatgatccagtcggcggacttgaccacgtcgagattgtgctcgatgacgatcacggtattgcctttgtctaccagtccctgcagcacgagcagcagtttgcgcacgtcctcgaagtgcaggcccgtggtcggttcgtcgaggatatacactgtcttgccggtggacctgcgctgcagctcggtggcgagcttgacgcgctgcgactctccgccggacagcgtgggcgcgggctgcccgaggcgaatataccccagtccgacctgcacgagcgtgtcgaggtagcgggagatcgacgggtacgccttgaagaacgtggcggcctcctcgatcggcatatcaagcacgtcggcgacggtcttgccgttgtatttgacctccagggtttcgcggttgtaccgcttgccgtggcattcctcgcattcgacgtacacgtcgggcaggaagttcatctcgatcttgagcgtgccgtcgccgtggcacgcctcgcagcggccgcccttgacgttgaacgagaaccgccccgggccgtaaccgcgcacctgcgcctccggcgtcttagcgaacagcgtgcggatcttgtcccacacgccggtgtatgtggccgggttcgagcgcggagtgcgcccgatcgggttctggtcgacgtggatgaccttgtcgcactggtcaaggccctcgacgcgcgtgtgcttgcccggcacgatgcgcgcgccgttgagcttgtcggcgagcaccgggtagaggatcgtgttcaccagggtcgatttgccggagccggagacgccggtgaccacagtcatcacgccaagggggaaatcgacggtgatgttcttcagattgttctcccttgcccccaccacgcgaaggcgcttcgtggcatgcggcttgcgccgcacggccggcacttcgatgctccgtcggccggcgatgtaatcgccggtgacggaccggggcgcctcgatgaggcgcttcgccggaccggagtaaatcacctcgccgccgtgctcgccggcaccggggccgatgtcgaccacccaatccgccctctcgatgatttcctggtcgtgttcgacgacaatcagcgtgttgccgaggtcgcgcagatggtgcagcgtctcgatgagacgcgcgttgtcacgctggtgcagtccgatcgatggctcgtcgagcacgtacatgacgccgaccagtccggagccgatctgcgtggcaagcctgatgcgctgggcctcgccgccggacagcgtcttggccgcgcgcgacagcgtcaggtagttcaggccgacatcgttgaggaatcccagccgggcccggatctccttgaccacttcgccggcgatcgtcgccgccgctccctccagtttcagcccattgatccacgctagcccgcgttcgacgggcatgtcgcatacatcggcgatggattcgccgtctacggtgaccgccaacacttcggggcgcagcctcctgccattgcacgcctggcagggaacctcgcgcatgtacgactcgtagtactgcttcatctggtccgagtcggtctcgtgataccggcgcatcagcgtgcgcacgacaccctcgaatccggtcgaatactcgcgcagccgcccccaccggttgcgatatgagacgttgaccttgaaatcatgcccgtacaggatcgaatgccgcacgtcctcaggcaaatcacgccatggggtgtccatggagaacccgagttcgtcggccaggccctgcagcacatgcccgtagtattcggtcgtggtcttgccgcctccccacggctcgatcacgccgtcggacagcgacttggaatcatcggcgatgaccagatcggggtcgatctccagcttgtagccgatgccatcgcacacagggcaggccccgtatggcgcattgaacgagaacgtgcggggctcgatctcgtccaactgcagctgatgcccgttcggacaggccctgtgctccgagaacggctgacgccgattcgggtccttctcgtccaagtccacgaaatcggcgacgatgacacccttggacagccgcagcgcggtctcgatcgaatcagtaagccgctgtcggatgccgtcgcggatcatcagacgatccaccacgacctcgatggtgtgctttttctgtttggtgagcttgatgtcgtcggacagctggcgctcctcaccgtcgatcagcgcgcgggcataaccgtcgccgcgcagcagctccagaagatcggcgaactcccccttgcggccgcgtacaacgggcgcgagaatctggaatctcgtgcgttccgggttcttcagcagcgtgtccaccatctgctgaggggtctgcgcgctgaccagctcgccgcattcggggcaatgcggtacgcctgtgcgggcgaacagcagtcgcagatagtcataaatctcggtgatcgtgcccacggtcgaacgcggattgcggtttgtggtcttctggtcgatcgacaccgcagggctcaatccctcgatgaaatccacatccggcttgtccatttgcccgaggaactgacgcgcatacgcggacaacgactccacataccggcgctgcccctccgcgaacagcgtatcgaacgcgagtgatgacttgccggagccggacagtccggtgaacacgaccatcctgttgcgcggcacggcgagatccacgttcttcagattgtgttcacgcgcaccctgaatggtgatcttcagatcgttcgggatatgtgagatgtccgccaccaatgaggagtcggtcttgcgcatcggcgccttgcggatctcgcgcgacaggaatgtgtcgctgctcatcacacgttcgatcacgacgtccccgccgcccgatttcgacgtcttgcgtccagtcacaaccccgcctttcctcgcacatcccatcatcaacggtagatcatgctcaacaatacccgacttcaagacaaatgtcgaacatcagttcgatggcgtgtcccatattcaaacacatggactatacaccgtccgatccgcgacgcccccgaatacgcaaaagccggacggccatcagaccatccggctttgcacggcgaaaccgcatcacggccgttccgcgaccgtcacacgatcatgcacacgccctcacacccgctgctgcagccagccgacgagcagaacaatcacctgagcaagcaggccgagcagcgcgaagaagccaatccacgcaatcgcggtggcggcaccgtccgagtaaccgtagccgtaatatccggaattgccggagaacaggtagatgagccacgcgagcaccttcaggccggcggccacgaccatggcgacgaacgcggccatcttgaaccactgcggtccgtgctgcacgacgttgagaccgatgacccacaccgccaggattgcggtgagcatgagccacggagtcgagccgaagaggagcttgtagccgaatccgctcatgttgttgccggcatcgacaagtctgaggaacgacaggaacgtctcgatgccgatgaacacgaccatgagaatggcggagatcttggtgaccgcgcgcacgttcatcgtgtcgaggaagctcggcccctgcggctggggagcgtagccgggctgctggggataccccggctgctgcgggtacccctgcggatactggtatccggcgggctgctgcggagcctgaggagcaccataaggcgcctgatatgcgggctgctgcggggcttgcggctgctgcgggccgggctgctgcggatatgtcatggctaacttctttctgtgtcagtccaatatgatggtttcaatataccgccatttcatgtccggctgacgaaatactccacatatttgacgggtattcgttgtgcgatgccacaatattcgctgcaagacgacgcacgaatccggcacgcgccgccatctattcgctgcgcagcgcccagtgcccgtcgcaagccgatttcgtctcgttgttccatgaccgtgacgatcatcatgttggcgatgctcataccgcccacgatcagcgctatcacgccgatcatcaggcccagcgtcgtcagcgagtcgtccgcggtgtttctcgcctgtgacaggtcagccgacgcggtgacgtacacgccgaagccgccgatgttcgccgcgtgggcgaggatacggcgaatcctttcgtcgttgcctgatttcgtgcgcacgtagatcgcactaatccggcgtatcatctcctcctagtccgagtattgcgagaacgcccattcgtcgccgacgatgacagagcctttgccgggcttgtcgctccttccggtacgggcgggatccttgaccaaggtgaatcctttggcgcgacattccctcacatagcacaacgccgcatgtcagcccccccatcaaccgtttaccactcataagcgttttctttccagtaagagatccgttgaacaagccggatgggcgaccatgcccatcttcatactccgatggcggaatacgataccattcattgcatgccgaccatggttcctatacaactttcatcgtatcctcttaataacgtttgagtgttccatgaccagccgccggatgctcactcagctctgaaaaccgcgacaataatggaaacggattggttctcacgcaacctacgtatccgaggaggttcccatgcgcatactgatcgtcgaagatgaccgtgacctcgccgccgcgctggacgacgcgctgcggttcgaggggtatgcgacccgcgtcgcatacaacgggctggaagcggtgcgcatgctcgccgagcaatccatcgacatcgtgctgctcgaccgcgacctgccgatcatgtccggcgacgcggtgatggagacgatcgcctcgaacgacatccccgtgtccgtgctgatgctcaccgcggcagcgcaggtcagggaccgcatcaacggtctcgaactcggcgccgacgactacctgatcaagccgttcgcctatcccgagctactcgcgcgcatacgggcgctgcaacgccgtgccggtaagggcgacttctccggcaccgaattctcacacaacggcatcgtcctcgacacggtccgtcacaccgtgacccgtgacggcaagcccgtcaacctgtcgccgaaggaatacggcgtgctgctggagatcatgaaggcggacggcagctacgtcaacgccgaggaactgttcgacaccgtgtgggcgggcgcatcagccaccgacctcacggacgccatcaaaaccaccgtatactcgctgcgacgcaaactcggcgagggcaacggcatcacctccaccagaggaaaggggtaccgtctgtcatgaccgcatcacacgcagcagacgccgcaacagactcagacgcaacctcggaggcagccccggtcaacgacacggccgcggcaacggccgccgccaaagacaccgccggcggcaatggccatacacgccgtcgccgccgattcccctggccgtcgacgttccgaggccggctcatcgccaccatatccatcgccgccctggcgatgctggccaccgtcatcatcacgcagaacatcatcgtctcacaggcggcacggcagcagaagaacaacatcgtcatgtgcaccgacaaggacaccggcgaactgatcacggtgtacttcgacaagaaccagaccagctacgacctcgatctggaggatgcgccggacgccgtcggcagctccgccaccgccgtctgctccccgatgctctcggtacaggaggataccgtcgagacctccgacccggagtccaccgtcaccaagatcgaggtgacgcatatcggcaagacggcgagcgccatgaccgactccttcatcacgatgatgcagttcatctccatcggcacgttcatcattttcgccgtgctctcgctcatcgtgtcctggctcgtcggctctcgcctgtccaaacgcgtggccaagatcagcaagcaggtggaggcgttgaagcccggcgatctcgacgctcgcatcgcccccgacggcagcgatgacgagatcggcaagctcatcgaatccatcaacggcatgctcggccgactgcagaacgccacggaagcggagcgtcggttcgtgtcgaacgcctcccacgagctgcgaacacccatcgccgccgtcgcgaccaatctggacgccccactgtcccaaggccgtttcccggccgacgtggagcctgccatcaggcgggcgctcgccgcgaaccgtcgcggcagcgacctcgtgcaggcactgctcacgctctcgcgcatccagagcggcgtcatcgatgccgaggacgtcaccgccctgcagctcgccgatttcatcgacgacgagctggccgaggtggaggagcaggccgataagcgcaacatcctcgtcaccacgcgcgatgtcgcaggcgacgtgcaggtccaggccagcaaatcgctgatggacttggccatcggcaacctgctgcgtaacgccatcatgcacaacatcagctcgggcacactcgacatcgccgcgaggcaggagcactgcgccatcatcgtgaccatcaccaacagcaccgacgaaacgctgccggacgatctgatgaatctgaagcagccgttccaccgcggcgaacactcacgcatcagcgccgagcccggcgtcggcctaggcctgtcgatcgccgacgccgcatgcgaggccatgggcgcgacgctggaattggacaggccggacgagcaatcgttccgcgccaccatcaccatcgcgtcggcatagattgatactgcggcaacggcccgtccagctacttcgcgtactcctcaagcgtctggccggactcatgcatcgccttcgccgcctcggctcccacataccggtaatgccatgattcatacgcgttgccggtcacgtcggtcttccctcgcggatagcgcaggatgaatccgtaccgccacgcgttgtctgcaagccactggtgctcgttgacgctgtccttggtgccggtggccccgctcgcgttgatgtccaccgccaggcccagctcgtgctcgctggtccccggctcggccacccattgcgacgcctgtcttctcgcctcctccttcgacgcgccctcgttctgatacaggaatatcttctcgtccagcagctgccgctgcacggcctccgtacggtacgccgacgtgacctccgggtgaagccccgcggcacgcatgtcatcgaacatgcgctgcagatcgggatagatgcgcgaatccacgctctcgccgttgctgagcctggtcagtttcggtgccggatagtcgtcgggaatcctgttccaccggttgacgacaatcagactccagctcgacggagagtatttcgcctgtgcggcgccgggcgcaaacggtccccggcccgcgaaacgccccaggcagaacagcagcgccagtatggcggcaagcaggacgcccagcacgaccgacacgcgcagcagcgtcctgcggttccttctgttccggcactcggcgaacgtccgaacgcgcccgtctcccgtcatcatccgttccatgcctgtcgctccttcactggtctgccgtcatcgcaacatcaccataaacattaggattcgtaaggtttcccggccatcgaccacggggacgaaacggcttatgatccgcggggatgacaaccccgagacacccctgagtcagtaccctgaccgccagtcggcacgtgttcgctatgatggacggttggacttcaacgaatacggacaacaacagaaagacgagcgggacacatggctattgaggcgcagggacttgagattcagatcggcgcgcgcaccttgctccatcccaccgatttccacgtcgccaaaggcgacaagatcggtctggtcggtcgcaacggtgccggcaaaaccacactcacccgcgtcatcaccggcgacatgctccccaccagcggcaaggtgcgcgtatccggcaagctcggctacctcccccaggacacgcatgccgccgaccaggagcagaccgcgctcgaccgcatgatgagcgcccgcgacatcgcctccatcatcagccgcatccgcaaagccgaaaaagacatgaccaacccggacccggacatcatgaccaaagccatgaaccggtacgacaaagccatgcaggacttcgacaaggccggcggctatgccgcacaatccgaggccatcgccatggccgacagcctcggcctcccccaggacgtcatgcagcgtcccctcggcaccctctccggtggccaacgccgccgcatcgaactcgcccgcatccttttctccgatgccgacaccctcattctcgacgagcccaccaaccacttggacgccgactccatcgaatggctgcgcggattcctcaagaaatacgaaggcggattcctcgtcatctcccactccaccgagctgctcgacgaagtcgtcaacaaggtctggcatctcgacgcgcagaccggccagatcgacatgtactccctcggctggaaagcctacctccaccagcgcgtcgtcgacgaggagcgtcgtcgccgcgaacgcgaggtcgccgagaaaaaagccgaccggctcatgaagcagggcatccgcctgcacgccaaagccaccaaggccgtcgccgcccagaacatgatgcgccgcgccgaacggctcctgtccgagacctccgacgcccagaagcaggacaaggtcgccgacatccgcttccccgaaccggcaccctgccgccgcacccccatcatggccaaggacatctccaaggcatacggctccaacatcgtcttcgccggcgtcaacctcgccgtcgacaaaggctcccgcgtcgtcatcctcggctacaacggcgccggaaaaaccaccaccctgcgcctgctcgcccacatcgaagaccccgacaccggcgtcgtcgaatacggccacggctgcaagatcggctacttcgcccaggagcacgacaccctcgatctcaacgccaccgtgcttgagaacctcacccacgtcgcccctgatctcaacgacactcaggctcgttccatcctcggctccttcctcttctccggcgacgacgccttcaaacccgcccgggtcctctccggcggcgaaaagacccgtctcgccctcgccacgctcgtcacctcccgcgccaacgtcctcctcctcgacgagcccaccaacaacctcgaccccgcctcccgcgacgaaatcctcaaggccatcgccaaatacgaaggcgccatcgtcctcgtcacccacgacgagggcgcagtccaggccctgaaccccgaacgcgtcctgctgatgcccgacggggacgaggatctgtggaacgattcatatctcgacctcgttgccgaggagtgatggagtgtcggctgcgttgttcctcagtcgcggtaccctcgtaccgcttccttcggtacgccttgccgacacacgcatcacttcacggcaatccactgaacgaacaccacacatatcgggcctgtccgcacccttttgcgtgcttaagtgcgcgccggaacgacgaccgtgcgcacttaagcacgcaaaccaccggttttgcgttcctatgttcgcgcactcgtcgttccgacgcgcacttaagcacgcaaacgcgacttgacccatgaccttgccaacgttccggcgaatatcaacggcaaaaaacgaatgatgcccggtggttcctgaatctcaggagccaccgggcatcattcgtaagacggccagacgatcaaatcacgccgatcagccgatcgcccgggccgatgtcactcggcgtcgcggtaaccgctcgggttcttggtctgccaattcatcgacgacgcagccatgtcgtcgatgccgagctcggccttccagccgagttcacgctcggccttggaggagtcggcgtagcaggcggcgatgtcgccggggcgacgcggcttgatcgcgaacggaatcgcgtggccggcagccttctcgtacgccttgatgacctcaagtaccgagtatccgtgaccggtacccaggttgtaggtgaacacgccggggccctcgaccttgtcgatgacggcgacgtggcccttggccagatcgacaacgtggatgtagtcgcgcacgccggttccgtcgggcgtgtcatagtcgtcaccgaacacctgaacctccttgagctcgccgagtgcaaccttggcgatgtagggggtcaggtttgccggaatgcccttcggatcctcgccgatcaggccggactcgtgggcgccgaccgggttgaagtagcgcaggatgacgacggtccaggagtcgtcggcgacgtgcacgtcgcgcaggatctgctcctcgaagaacttggtcgtgccgtacgggttcgtggtgccgccgatctggctctcctcagtcagcggcagctccttgggcgtgccatagacggtggcggacgacgagaagatgaccttcttgacgtcgtgggcgcgcatggccttgagcagcacgatggtgctgttgaggttgttgtcgtagtattcgatcggcttggcgaccgactcgccgacggacttgagcgaggcgaaatgaatcacccagtcgatgtcgttctcggtgaagatgcggtccatcagcgcctcatcgcggacatcgccctcgtagcgcttgacggtcttgccggtgatctcctcgacgcgatcgagcgccttgggcgacgagttgctgtagttgtccacgcagacaacgtcgtaccccttgttcagcagctcgacatcggtgtgcgtaccgatgtagcccgcgccgcccgttaccagaatggtagtcatgtgttcctccttgaaaaacagctgtggatgactccaacagtcattctaatgctgagtatggaatccgaggccttccatgaagtcccgggtgagttccttgtgcttgaacacggccgtgttgcccaggatgcgctcgcatacgctgccgagttcgtcctgcaccgcggcgtggatggcgtcgcggtcgcgctcgccgttcagtgtcgcggtgagttcgtcccattcgagcgtgaactcgccgacctcttccggcagcggcttgccctcggcgagggcgtcctcgatcaggccaagctggttgatgagacggccgggcaggatgaacagcccctgcgcctcgatcaggccgatgggctcctgcttgaccggccagaactcgggatgcgcatggaagatgccttccggcagttcctcgctgaccgagttgttgcggaagatcaggctcatttcgtagccgcgctcggtgatgatcgcgctgggcgacaccgcggagcgcttgccgtcctcgccttcgcagatgatgtccagctcggggttggagtagttgatccagccttcgcggatcttgtcgcacacctcgatgatcgtgtcgcgcgatttggcgaccacgcgcacggcggtgccgggccagtcgaggatctcgatggtcgcgtccgggtattccggcagcgtcatcgtcgcccaggctgccgccttgtgcatcggcagcagttcgccgccgccctggtaatggtcgtgggcgagcacggagccgccgatgcgcggcagcgcggcgttgcacccgaggaagtatccggggaaccggtcgacgaagtcaagcaggtgcccgaacgtggagcggctcacgtgcatgggcgtgtgctcgtcgttcacgcagatgccgtgctggtagaagtacccgtacggggagaactgccagaaccacggttcgtcgccgagtgtggcggggatggtgcgcagcgtgcgcttgttgcgccccgcgaaaccctcgttctcatggcagatcgtgcatgcggggtatccgccggccaccgaattgcccgcggcggccttcttcatgttcttgaattcgggcttggcgaggttgatggtgatgaccaggccgtgggaatcgaagcgcgggttcttgtcgagcacgcccttcttgacatagttgttggcgacgcagtagtcgtagaaccagcgcatggcctccatgccgccatgttcgcgttccactgcctcgaaccggtcctgcacggcggacggcgtgccggagagcatgcccatcacgatgtccgcgtacacgggtccttcgtcggcgtcgaacagccccgccgcgacggccgcggcgcggaaccgagtcagcaggtcatcgggcagcgtgtcgtcgctggtcgcgccggtgggacggtacgagtcgagcgagaacagctcgaagatgcggttgcgcgtccagtcggcatcgcgcgggtcgagttcaagccgcttgcgcgcgaagtcgacgagcgcgtcgatgctcgcgtagacggcgtcgagtccgccgcaggcgcagtcgtccttcttctcttccgtggtcatcagcgggcggtcctttccatgacgtcgtcgacgatggcgcgaatctcgtcggccttctgctccatctcctgcacgagcttgatctgggtgcgagcgcgcacgaggttgtgatcggggtacttggtggcgaagtacgtgtcaccggcgaggtagtcggcgaggaagcgcatgccgcattccatcgtcatcatgttgccggcgaatgcgagcagctcggcctccttgtcggtgatgctgtcgcgcaccttgccgacgaagccctccgcgtaggcgcggaacagttcggtgctgaagtggaccttgtcgagatccttctcgtcttcaagcgcggtggacgcgccgaagcggatggaatcgccgaagtcgaacagcatggaacccggcatgatggtgtcgaggtcgatgatggcacgggccttgccggtcttcgcgtccatcaggatgttgttgagtttggtgtcgttgtgggtgacgcgcagcggaacggagccgtcggccagcccgtccatgatgcgggagtactggtcttcgtgggcgaggaagaagtcgacctccggcttgcaggtttcggcgcggcccatcttgtcggcttccagcgcagccttgaagtcgcggaagcggctcggcgtgtcgtggaagtgggcgatggtctcggtcagctgggaggcgtcgaagccggccaggaagttctggaactcgccgaacgcggcgccggactcgcggaacacgtcggcgttggggacgaggttgtaggagatggtgccttcgatgaacttgtatatcctccaggcgccgtccacctcctcgttttcgatgtagctcgcgccgtccttggtggggacgatgtcgagcgtctcctggttcttggagcgcaggtaggcggtgacgagttcgatgttgcgcatcaggtgcacggtgtccgggaagatgtccgtgttcatcttctgcaggatgtaccggtgctgatccgtgttgatcaggaaggtgacgttgatgtggccgtcaccgtatgcggtgatgcccttgacgtcgccgtcgatggcgaactgatcgacgatggccgccagtttcggatcaatgtcagtcatgtggaaccctcttttccttgttgtgccgcaggttgccgccggtcttcaccgccacaacgaccccctatctgaagctgctgtgccactgcgacgcagcagctgttggcgcatacgcaccgttatttgttaattatagttacataaatgacaaaccgccattcttcggcgtttatagttcctgaatccccttttctattgctataatataaagactgtggatttgaacatgaccacaccgcagctcgcatgatccgaatcatgggcgctctgacaagaaacgactgaaccaatgacctcgtacgccaacaccatctcgttccccctgcacacgcccggcaggacgacgaaggcaagtcccgccgacgtgcgccgcaacaaccgttccctggtgttcgggctgctgttcccgaacgggcagctatcccgcgccgacctcgggcggcagaccggactctcgcgcgtggcgatatcgggagtcgccaacagcatgctcgacgaagggctgatctgcgagagcggtttcgacgtcaacgcctccggcaagggcaagcgcggcacgctgctgagcatcgacacgtcgcgtctgcacatcatcagcgtcgacctgtcccaggagcatctggtgcagggagccgtgaccgacctgctgggcacgccacagcagcgcatggaaatggcgctcggaccggataacgacatcaacgcggacatgatcgtgcagctggtcgaccagctgcgcaccgacatcgacgccgacacgatcatcggcatcggcatagcggcgactggtgtcgtcgaggacggtgtcattcgcgaatcgacggtgttgggatggcgggaccttgatctgagaggcatgctggaacgtcgtttcggattccccgtcaccatcagcaacgacgtcgtctgctccatgctcgcggagcgattcttcgggcatggcgacaagagcatgctgttcatcaagatcgaccgtggcatcggtgccgcgacgctgatcgacgatgtgactgtgatcgggcagaaccatgccggaggcgagatcgggcatatctccctcgacccggagtcgggggtgttgtgtccgtgcggcaagcgcgggtgcctggagacgatggtcacatcgccggtaattcgcgagcggattcgccgcgcgtcgacgcccgaggagcagctggacatcatccgatcctgcggcgagcagctcgccgcggcgctcgccatgccaatcggcctgctcgacatcaacgacatatgcgtgtacggcccgccggacatcgtgaacgcggcgttcctggaggcgacgcagcgccgtgtggacatggtgtcgtcgtcgaagttccacaagcatacctccgtgcgacggtgccaggtgggttcggatatcgcgctgcgcggatccgccatcgacgtggttcatcattacatcgagaacggtcactgagagaaccaccgaaaggtccttgcgatatgaatcgagggccgctcccccgttcagggagcggccctcgattcatgttctgctcacatccggccgtgcggcccgggtggttttggaaactccgtcgccggtaccggtgtgcctatcaggcctccggcgcggcccacgcggcgcccagcgctccgaccggctggtcgagttgcgcaagcttgatgcgttcgccgagatgcaggcccgtcaggaacgggcaggtgcgctcgcgcacgcgcaattcgtccagggtgacgtcgatgagcggctggccggtcttcgccatgccaccgccgaagataatcatgcgcgggtcataggattgtgcgacgatctgcacggcgtcgacgatggcatgggtgaccatgacgagtatgcgctgggcgtcaggctcgccgcgacgggcgcactcgatgagatccggcatcggaggcttgccttcgaccggccagtgacggccgaccgacgctccggagcacacggtctcaagacagccgctctgcccgcaggggcacgggaagcggttcgggtcgatcgggatatggccgatctcgccggcggcgccgctgaaaccgtgctggacgacgccgtcgacgacgatgcccgcggcgagtccggtgccgaagttgaggaacacgatggttccttcggggtgggatccgccgaccatacgcgcggcgccgaccgcggccgcattgacgtcgttctcgacgtgcacgggaataccgaggcgcttgcccgcttcggcaccaagctccagcgtatcgatgtcgaggttgacgacgttgtcgacacgaccggtttctggattgacctgtccggggatgccgatgccgaccgtggcgacctgatcgaacagatcgccggccacctcatgggtgatcgatacgacgtcgtcgatgacctgcgcgttgccgcgtcgtgcgggaatgcgcacgacgttgcgaacattatcctgcggatcgacgagaacggcctcgatcttggtgccgccgatgtcgatgccgacgcggaagcggtcggcaggtgtctgctgtgctgtatcctgcactgtcatgtgttgtgtccttacgtaacagcggatatgcgcggttcgcacatccttgacgaatatgtggggcaaggcatatcgtcatgccttgccccaccgatgggtctgagtgtcagggcctccggaggaaggagaaggaaagcacggaagccctgatcctcaagtcttgctgtccgatccatctgtccccgtccgtcccgcatcatgccgcgggacggacggggactgcacagatcagaggttgcgccaagcgatggcgctctggtcgaggtcgaaatgctcgaccgaaccgtcaggcagagccacatccgtggactgcggacggtcggtgttgttgatcacgcagtactggccggcatcggggaacaccgcgacctcgcactcggggttggtggagctgtatgccgtgtacttgtcctcgttgtgggaggcccagaacagggcacgctccagcagacgggcgttcgcggccgagtagggcagaccggagatgtatacgccgcggcccttgccgtactcgttgaccgcgagctgcacctgaccaccgtcggcgcgcagcagcgtcacgtcctcgttgaccgggaacgtgttcgcgaccggctcgccgaagtcgatgccgccaagcggcttgatgccctggccaccgccgcagcccgacagcgggatgcggtatccggccttctcccacgcttcgcgggcggcgggatcgacatgcacgtcggcggtgatgaagtgctccggcgtgacggttgggaagtacttgtccaccgacagcgtctggtagcgttcctcgtccacgcccagcacgtcggccagctggaagaaacgaccagcctggaaacgggccagcgaactgggctctccgacgccgacgaatgctccgccgccgcgcacccaggcgcgcagggtctcggtcagcttcgggttcttccacacgtctccaccggtgaacgcggtgtcgaccgggccaccgttgatgatcacgtcgatgtcgtcggcgacgccatgctccagcacgtcatcgaagctgatgaaccgcacgttcacgcgcatgcccgacagcgactccagaatgccgtaatacgaatacgtctgcttgttcggcagcgcgtgggcgaccgtgaacgccatccacgaacgcatcttgccccacgagttcagaatcgccacgttgagctcgccttcggcggcgactccaccggtacggtcatggatgtcgcggaactcgtcggcgatgtgggtgacggtatcgacgaacttcgggaacttcgcggccagcgacaggtatccgccgtagcccatacgcgaaatcggggaacgcaggatggcacgacgcgctttacgccagttgtcgagaccttcgatgctcggatcgttgccctcgtagaacgtgtcggggaagaagtacggcaggaaacgaccctccgtgtacttcacgcccgggatgtccgcgatcatgcgggtcgtggtgccgtcaccgatcgaaccgacgacagcatccaggcccagatcctcgaaaccatccttgtacggctcggtaccgatccactggtcacccaggaacatcatcgcttccttgccggcctcgtgcgacatgtcggcgagcttcttgacattggcgcgaacgaaaccggagaggaagtcgatccagtcgcgttgggccttgcgcggcacgcgccacgcggagttataggcgccgccatctacgaagtcttcggggcgcaggcggtagccgtactccttctcgaagtcgtcgagcgcggccgggctcacggtgcaggcgcatccgaaccaatccacgaccttctcgcgctgcttctggtcgaacagcagcgtgaactggtagaagaacgtcgtgaaacgcacgacatccacctgcgggttgtccttgagccactgctcgaacgtgtcgaacacgaacttgcgcgtcgccgggtggtagatatcgaacggaatctcgtgctccttgtcgccccacccgttcgtcaggtggttgtacatctcgaccggatcccagatgatgtacgcgaggaacgagaccgtgtactcgtgcatcggcgtcgcgccggagacatgcacggtatcggtgtcctcatcaagcgtccacagggaggcatccacgacctcattggtggtgcggtccacgacttcccagtacttgtgcgggtcggcgtcacggttcggcttgagctgctcctcgaagaagccgtccatcaggggaacatccacgatgtccgcttccgccaggacgcgcccggtgagcaggtacacctgcggggtctcgtccatgtgcagcgtgatccactcgttgtgtgcacgggtcgggaagtaggcgctgtagatcttcttgccgagtgcgagcacggactcgtcaaggtgtgtgccatcggaattacggatggcatcagcgccccacaattcggcaagttccttggttttttcagcgaagttctcttcactgggcaatgtgaagcggccagtgctggtcatgggttctccttcttgggaacagtcatcggggaaagatatatgggtgatgaaatcacgaaggccgatgaaatggccggcatcatcgcaggcccgctggatcctgactgcgcaaatccttgacgcctacgatgacgctggacgatggtaatcgtgtcactgatcgaggtgatggccgtaccgcccggcactcagtgacacatcatgccgggcggcggttcgtggttttctcccgcacatggcgggagaaaacatcagcccttgacggcgccggcggccaggccggactgccagtagcgctggagaccgaggaagatcacgatcaccggcagcacgccgagcagtgcgcccatcatcagggcgccgcgatcggtgaatgtggccaacgacaccatgccgtacagacccagggtcaccggcttgagggcgtcggaggacaccatcatcaacggcagcaggaagttgttccacgtggcgacgaacaggaacaggaagatcgtcaccattgccggggcgagaagtcgcagcacgatggtgaagaaaatcctggcttcgctcgcgccgtcgatgcgggcggcttcaagcagttcatcaggcacagagctctgggcgtacgtacggcccaggaagaagccgaacggcgagacacagcacgggatgatgatggacgccatcgtgttggtcagcttcagagcgtggaagatcgagtactgggggatggtgagcagggcggcaggcatcagcatgcaggccatgatgatgccgatggcgacgttcttgccgcggaagttgaacttcgcggtggcgtagccggccatgacggacacgatggtgccgatgagtgcggagacgcccgagtagatcagcgagttcagcacccagcgccagaagttgccacgggtccagccgagcagcttggagtagttggtggccacggcgttggggatctggtcgagcgacacggagaaccacaggccattgccgctggtcatctgggagggcgtcttggtggacgcaatgatggcccagtaaatcgggaacaggaagtagatcagcgccaacaccagtacgatgaccgtaagtgtcttgactgcaggcgacggcctcatggaacggggcagatcgtgctgtgcagcctcgcgctgcttctccaaacgacgttcgcgcttcttgttcgcgcgcgcttcagcggttgcagagctcattactcgttcaccttcctttcagcaagggtgtacacgacggcaagcagacctgcgatcagtgccatgacgatggcgatggctgatgcggggccgtcacctgacggggtaagcgttccctgcgaagtattcatggccatcatcatcggcgtgtacgccttggagatgcccggatccgcggtggacatgatctgcggctcgttgaacagctggatggtgccgacgatggacagcagcatggcgagcagcgccgcgccacgcacgttcggcagcttgatcttcatggcgacctggaagccgttggcaccatcgatgcgggcggcctcatacaggtcgtgcgggatggcctgcagcgcggcgaggaagatcagcatgttgtaaccggtgaacgtccaggtcgtgatgttggccatggaaccgaggacaacgttgttggcaaagaagtcgacatggatgccgatggactccagacccttgacgattggggaaatctgaccgttgtacaggtagacccagatgatggaggcgacgacgccggggatggcgtagggcaggaagtagcccagacggaaaccggtaacgtgcttgacgacaaacgaatcgatgaccatagccagcgcaagggcggcgatgatcatgatcggcacctggatgacggtgtagagcagcacatggccgacaccagtccagaatttgccggaagtgatgacgtattggaagttctggaatccgacgaactcgttgaccagttcgccgccgccatagaggccgccgccttggctgacctgacggaagaagctggaatagacggcccagatgatgggcaggaggaacacgaaggcgaacaagattgcgaacggcgccatgaacgcccagccggttcggttctcgcgcttgaatgccttcgagcgctttggctttgcggcggcgcgtttcggcgcggcacccttggcctgagtaatggatgcagtcataatacaaacctgtcttttcgaaaaacagaaaaacgattccacgagcatgtactcttggacatatgaaaggccggagtccgaatccccggcctttcattttatgatgcctgaggcatcggtggtcttgggtgatggacggaacttttcagcttatccatcaccggaccgggttatgttcactccttgacagggagcttggcgttcttcagcgcttcgacggaagtcgtctgagcggtgtcgaagatgtcggagaccttggcgtcaccagtggcggccttggcagcagtctcgttcatcgctgaacccacggcggagaagcccgggatgtagctgaacgaagccatgttgtcgttcgctttcttgaactcagccatgatgtcctggttgctgaagaactcggaccacgcagccggagtcttggcagcctcagtggtggcggccacgaccagaccctgggagaccagatccggaacctgggtgttgaaccagtcgaggaacttcatggcctcggccgggtgcttcgagcccttgagcacagccacgccggaaccaccgtcggagccggtcttggtgccgttgccgaaccaatcgggcagctgggcgaccttccactcccccttgccggtgccaccggcggagctgatgaacagcggggcttcccaagcggcagccacagtgccgatcagctgacccttgttaatggaggcgtcgaaggacggatcccaacgcgggttggtgagcgcggacttgtcgtcgagcagctgctggtacaccttggccacggccttggagcctgcagtctgggtgtcgaccttccaggcattaccctcagtcttgtaccactcgccggaagcgccggaagcgctggacatcgtcatcatgccctcatcgggctggaacgtcatgatgtacttaccctgggcggcggtcttcttggcggtcgcgataagctcgtcagcggtcttcggcacggtgatgccgagcttctcgaactccttggcgttgtagaagtacgtcagggggccggtgtcctgcggcagaccgtaggccttgccaccgatctgcatcatggagaacggaacctcagcgaagtggtccttgtacttcgcggcctcttcggtgacgtcctgcaacaggccctgattgaagacctcaggcaactcggcgtatccgacctgagccagatcaggagcggcgccggccttgacgtcggtcgccagcttcttgatcatgtcctgagccgcaccatcgaacttggtggccttgacctggatgttcgggttgtccttgttccacttggccacgatgtcattgaccagcgtcatgccctctttatccggcaggcgatgcatgtaggtgatcgtcaccttttcgtctttgggggtattgctgccgttgttcgtggatggaccgcaaccggcaagggcgatgcccatgacagtcagcgacgccagaccagcaagcagtcgtttcttagctaccatattcctaactcctccattgaaatggatgttgcctcctcgtcgtggcaactaattagttagtgtaaaggcatgccaaggaaatgtcaactacattaacatttgtgtcgtgtcaccggtcacacagatggtaacccacggcgtgcaacaccgcccgccagtaagcatgacagatttatgtatataaagtttacaatttatttttctctcttctagtcgtcaaggccatccctatcgacaacaacggagtctccccgcgaaaaaccttacggaacaccggcctatacggcgtatagtacattccttcgacgctcgaatcaagctcatcctcataatgtgacactcctcacattaccagagtcattctggtcacgcagccatcttcatcctgctcacgcgccgaccgcaatgccgggcacgatacggaaaacgccccggcgtgtcatcaaggacacgccggggcggggcgcaaaggcgatcggtaccgcggggcgtctactcgacgctacgcagctgcgctgctatctggatggcctcgacactggcttcggccttgcttcgcgtctcctgccattcggtggcgggcaccgaatcgagcacgagaccggcaccggcctgcacgctggcctgatgatcgcgcaggaaggcggtgcggatggcgatggccatgtccatattgccggagaagtcgaaatagccgactgtcccgccgtagatgcctcggtcggccgcctccagctcgtcgatgatctcgatcgcgcggggcttgggagctccggacagcgtgcccgccgggaacgccgacatgaacacgtcgaacgtggtcaggttcggatcgaccgtgccagtaaccgtcgagcagatgtgcatgatgtggctgaaacgcttgatgtccatcagctgcacgacctcgacgctgctgggcaggcagaccttgctcaagtcgttgcgcgacaggtcgacgagcatgatgtgctcgctgcgctcctttggatcggcgagcaattccttggcaaggcgctcatcctcttccggagtggcgccgcgcggacgggaaccggcgatcgggaaggtcatcgcatgcccgttgtcgaccttgatcagcgtctcggggctggaaccgatcacgttgaaatcgcgtccctcggcgtcggtgagcgtcatgaaatacatgtacggactggggttgagcgtgcgcagcacacggtacacgtcgaacgggtcagctggcgaatccagatccagacgctgggatatcaccgtctggaacacatcgccgtcgacgatgtgccgcttcgtctcctccacccagcgctcatactcggccttggcggtgcggaaccgcagctggggctggggcatgcttcggtcaagcacgctcacgcgggcctcccccgccaccggcgtggcggccttgcgctgcatggcatccagccgttcgatggcctcgtcatacgcggcatcggcgcgggtcggccggtcgtcgacgttcaccgcattggctatcagccacaccgagccggacacatgatcgaccactgcgatgtcggtggccaaggccagcgtcacctccggctggccggtctcatccggcgcctcggcgcgcagtttgggctcccaatggcggatggcatcccagccgacggagccgaccagtccgctggtcaggttcggcagtccggccacgtgcggcgccttgagcaccttgagcgcggcatgggccacctcaatcacgtcaccctcagtgggcactccggccggcacctggccgagccagttcgccttgccgtgatcggagcgcagttgagccatcgaattgacgccgatgaagctgtatcggctccaggaaccaccgtattccgccgattccagaatgaacgttcccgaacggcccccggcgagacgctcgtaaaagcccacgggcgtcaacgaatcggcgagcagtcgccgcacgatgggaaccacacggtatccggcgtcggcaagccgatggaactgggcgcggtccggccatgtgccgccccattcgagaggctcgacgctgcacgcggccccatcatcgtgcaggccgccggccacaccggcatcgtcaatacgccgctcgctcatcacgcattctcctgttccgcggtacggtttccgacgacgaccggcaacgggccgccctcctcgaagcacgagcgcttgccggtatggcaggcggcacccacctggtcgacctgaaccagaatcgcatcgccgtcacaatccagcgccagggacttcacatactgcacatggccggacgtgtcccccttgcgccagtattcctgacgggagcgagaccagaacgtcacgcgaccggtcgtcaacgtgcgccgcagcgcctcgtcgttcatgtagccgaccatcagcacctcgtgcgtgtcatactgctggatgaccgcggcgaccagcccgcgcgcgtcacgcttgagccgcgcagcgatgcgcgggtcgagttcgtcggtgttgtcatagtcgatggtggattgcgtatctgtcatgtccttcatattcctgttcatgtccctatggagtcgtgttcatgcatgcggcgaatcatcgccggccggttccgccgcgattcataggcgaaccgtgtatcccgcggaccgaagcgcctgcttgacctcgcggatggtcaccagaccgtaatggaagatcgacgcggcgagcaccgcatccgcaccggcggcgatggccgggggaaaatcagcggccttgcccgcgccaccggaggcgatgatcggtatcttgacctcgcggcgcactgccttgatcatctccaaatcgaagccctcacgggtgccgtccgcgtccatcgagttgagcaggatctcgccagcgcccagttcctcggcccgcttgacccaccagatcgcgtcgatgccggtggactttcgcccacccatcgtggtcacctcgaacccggactgcgtatgctgttcgccctgctcgcggcgggcatcgaccgacagcaccagcacctgattgccgaatcggtcggcgacgcggctgatcagcgtcgggtcgttgatggctgcggtgttgacgcccaccttgtcggcgccgcaacgcagcagcgagtcgacgtcctcgggagtacgcacgcctccgccgacggtcatcgggatgaacacctgctctgcggtgtggctgaccacgtcgatcatggtctggcggtgcgagctggaggcggtcacgtccaaaaaggtcagctcgtcggcaccctgacggtagtactcccccgccagctcgaccgggtcgccggcatcacgcaggttctcgaaatgcacgcccttgaccactcgtcccgcatcgacatctaggcatggaatgactcggacggccaacgacatgattgctcccttatcaagctcggttgttgtacggataccaagggtagcgtccgcccgttacagcagtgccgcggcgttccgctacatgggacgggaaggccgcgccctctgcggttcgagattcgcggcctgcagcagtgagagcgcggttaggccgcgaaggcctctttggtcttggcggcgagctggccgcaggcgccgtcgatatcggagcctcgggtgtcacgcagggtggccgtgattccggcatggtgcaggatatcgaggaactgctgctcatcctcgggcttggatgcggtccagcgagatccctcgatcgggttgagcgggattgggttgacatgcgcccaatcgtcgccgtaatggttgagccgcttggccagcagtcgcgcgtgctcggcctggtcgttgatgccgcgcatcaacgcgtattcgatgctgacgcggcgcttggacgacaggaagtaatcgtgggcggcgtcgagcacctgagtggtgttgaaacgcttgttcatcggcacgagctcgtcgcgaagcgcatcactgggcgcgtgcagcgacacggccagacgcaccgggatgccctcggccgtgagcttcctgatgccgggcacgacgccgacggtcgatacggtgatgttacgcgcggagatgccgaacccttcgggaggcatcgcgctgatctggcgcacggcggatagcacggaccggtagttgcccatcggctcgcccatgcccatgaacacgatgttgctgagccggccggggcctccggccacttcgccgtcgcgcatcatacgagcggcgacgcgcacctgttccagaatctcgccggtcgacatgttgcgggtgagtccaagcttaccggtcgcgcagaacggacagcccatgccgcagccgacctggctggagatgcataacgtggtgcggttcgggtaacgcatgagtacggattcgatgtgagagccatcgaaaaggcgccacagcgtcttgatggtggtgccctgatcggccacctgatgggtcacctcgtcgatcagaggcgggaagaacgcctcgacgatatcgccgcgtgtggcggcaggcaggtcggtgaacgcctcggactcggtctccagccggccgaagtaatggttcgccagctgcttgacacggaacttcggcaatcccagatccttcgccctggcgatgcgctcgtcaggcgtcatgtccaccagatgcaccggcggcttgccccgtcgggcatggtccttggacagcacgtcgcggaaagcccccttgtcgccgggggtgattccggtctccggctgttccgcatcctgcgcatgcccggtcgtcattgctcctccatcatcgttcgtatcttgtcgtcgcttcccgcatcgtcatgtccgatcgtcgagacgaccgtcacatgccgacaatccacagcagtccggccaggaacggcgcgcacatgaggatggaatccacacgatccatcacgcctccatgacccttgagcaggtgtcccatatccttgatgccgatatcgcgcttgagcatggacgcgcacaggtcgccgaacgtgcctgcgacgccggtcagtactcccatgacgatcggaacccaccagcgcgacgcccacaccgcgccgtcatacgtgcagaagaacaccgcgaacgcgccgatcatcgcgaacagaatcgaaccgaacagtccctcgactgatttcttgggggagatgcgcggcgacagcttgtgcttgccgaaccatgcgccgaagaacaggccgccggtatcgctcagggccggcaggaacaccagcgtgatcgcgtgcgcgaccggatgcccgttgaacaccagcgacagcacgatgcagctggccagcgtagggatgtacagcacggtgagtatcgagacagcgacatgcgacagccgactgtgatgcagttcgcctttctcatggttgaacgacgactgctcgcgcgcggcggcgtcggagctcgacagcttggatgcgacggcgagcgaaagccagttgccgaagctgaaccgggcggtggcgagaatggccaccagcatcagcgtcgccatcgtcagcagcgccatcgtgccgaaatggtacgggctgtaataggtgccgagcaggatggccgccgaacacagccacagcgcgacgaccgggatatgcagaccgaccgtggcgaaatcgacacggagctcccacagcgcaagcaccatgaacacgacgatcagcagcacgaacacgtcgatgcggatcagcaggctcgccaatatgatgatgacgagcactgcgccggtcgcgaccgcctgcggcatgttgcgcccggtcttcttgttgatgttcgccagggcctcctcggcctccacatgaagctggtcgttgtgttccatgatgttcaaccgcctccgtaagtcgatggtgccatgatgattctgccttcatcatagcgaaccggacgaggcgatggtcacatgccgcgtccggttcaacgatttcgtcatgaaggtcagacctccatgatctccttctgcttggtctcgaacagcgcgtcgagctggtcggtgacctgcttggtgaccttgtcgagctccttgagcagacgatcgccctcgtcctcgcccatctcgccgtccttgacggacttgtcgatggtctccttggccttgcggcggatgttgcgcacggcgaccttgccgtcctcggccttcgacttggcgagcttgacgtattccttgcgacgctcgctggtcagctccggcatggtgatgcggatgacgttgccatcgcggttcgggttgacgccgagatcggagtcgcgcagggccttctcgaccttgctggcctgggacacgtcgaacggggtgacggaaagggtgcggggctccggcacgccgatggacgcgacggccttcagtggagtcggagcaccgtagtagtcaacgacgatgccattgagcagcgcggggttggcgcggccggtgcggatgcccgcgaagttctccttggtgttctccacggacttgttcatctgttccttggcttgttcgacaggattggccattttgtgctccttgttgttgttcttcgttgaagttggtttcctgggttggatgcagacgcgcgatcaccgatgcgcgtcgctcacgcgagcgtggattcggcggtggacaccagcgtgccgatctcctcgccgagcagcgcgcgggtcacgttgccggcctcttcgagaccgaacacgcggatgcgcttcctgttgtcgcgggccatggacagcgcggcggcatccatgaccgccaggttgtcgacaagggcgcggttgtagctcagcgttgcgaaacgcttggcatctgcgtccttgcgggggtcggaggtgtagacgccgtcgacgccgttcttgcccataacgacctcatcgcaatggatctccaacgaacgctggatggacaccgtatcggtggagaaatacggcatgcccgcaccggcgccgaagatcacgacgcggcccttctccaagtggcggatggccttgagcggaatgtacggctcggcgacctggcccatggtgatggccgtctgcacgcgggtggcctgcccctcctgctccaggaaatcctgcagcgcgaggcagttcatcaccgtgcccagcatgcccatgtaatcgccgcgggaacggtcgatgccggcctgctgcaattccgcgccgcggaagaagttgcctccgccgacgacgatggcgacctgaacgccctgccgcacggcggggacgatctcctcggcgatgcgacgaatcacctgcgtatcgatgccgacctttccgccgccgaacgcctcaccagacagtttcagcaatacccttcgtggctgatccgccgctactccatctgccatgcatagcctttctgatatcggttccctgatgcttcgtgagccggaaccgcccgacatactgcctatcagcgtatccgcaaactgcgacagtgcccggtagcgactcgcgcgatcacagcgattcggcgaattcctcgacccgggccaccacgtcgtcgagatacgacgcagaagtgcgccaccggccgggaacctctatcgaatgattggcctgcgggtactcatgcacgaggccactgagacgatgggcccggtcgctgcggtacagcgggtccgcggttcctgcgcagatcagcggttcgggagccgagccgggctcgtaatcgtcatcgcccggcacagggatgacggaccgtgtcggatcgaagtcggccggcgacagcacgggcgtcagcaaggccatcgggacgccgagccgggacacatgcgggtagatgaacgtcgacagcgatttcgccaccaccagggtgcgcggctgcgatgccggactcgaccggcgagggatgccatccagccagtcgtcgacagctccggacagcatcgagaatattctcggcgcgggggtcttcgacaggtccgcatcgacgtcgagccgttccacgaaccagccggcatcggccaacgccatcgcgcagtaatacagcagcggccgatcgcagttgtatccggtgcccggcatgatcagcgcatgccggtcggtcctatccgatgccatgcggttcttcggccattcgtttctgcggcaggtgggcttcgccgttccgctccccatcaacgatgaaatcatcgtcatgatcccccatatgatttttcgttattcgtgtgattgcatgctgtcggctggcatggccgcgccggccatgccaggtatgacaaaggcggccgacgcatgaaagcgcggaccgcctttgttgaggttcatctcagctcacaggctgtcccccggcccgatgatgcggaccggagcgggacgaatcaaaccttcgcggttcgattcactcctcttcgcccttgccgacctcgatacgggcgaaggccacggccttgccgccgacttcctcgaacagcttgccgacggtcttggacggatccttgacgaacggctgctcaagcaggacgacttccttgtagaaggcgttgagacggccttcgacgatcttcggaacgatcttctcgggcttgccttcggccagggacttctcggtggcgacgcgacgctcggactcgacgacatcggccggaacgtcctcacggctgagccacttggcgcccatggcggaaatctgcagagcggcctcgtgagcgaccttggcaccggcttcgtcggtggcgatcatcgcgacgatgctcgggggcatctcgacggacttcttgtgcgcgtagatctcgacgtgcgggccggagatcttggcgaactggccgaccttgacgtgctcgccgaacagggcggccgcctcttcgacggcgaccttgacggtgccgtcctcggcgttggacgccaggagctcgtcggcgttgttcgcgtcggcggccacggcgtagccgagcacggtgtcggcgaattcgacgaacttcggggtcttggccacgaagtcggtctcagaattgagctcgacggcgtaaccggtctggccttcggcggactcgatcaccttggaggcgatggtgccttcctgggccttgcggccttcgcgcttgccagcggcctggatgcccttggcgcggatgatctccttggcgcgggcgacatcaccctcggcctcggtgagagccttcttgacgtccatcatgccggcgccggtgtcttcgcgcacctgcttgatcaaagctgcagtgattgctgccattgatttgtctcctcgttaaaaatgtgtccccatagtgatgggaggctgttgcacctcccatactacaggaggtaggtcactcggccttggcttcctcggcctcggcggccggagcagcttcagcggaagcgccctcggtcagcagttccttctcccaagcggccatcggctgctcggcttcggtctcgccctcggccttggcggccccgccggaacgctccagcaggccatcggccactgcgtcggccatcaggctggtcagcagctcgatgccgcggatggcgtcatcgttggccggaatcgggtagtcgacggactccgggtcggtgttggtgtcgacgagggccacgaccgggatgcccagcttgtgggcttcctcgacggcgagcgattccttgttgatgtccacgacgaacatcgcggagggggtgcggaccatgttgcggataccgccaagctgcttctccagcttatccttctcgcgctccagcagcagcagttccttcttggtcagaccggagccgtgcacgtcggagaagtccatctcctcaagttccttcagacggctcacacgcttggagacggtctggaagttggtcagcatgccgccgagccaacgctcggacacgtagggcatgttcacgcgcgtggcctgggtctgcacggcttcctgggcctgcttcttggtgccgacgaacagcacggtgccgttgtgggcgacggtggccttgatgaagtcataggccttgtcgatcagctccagcgacttgaacaggttgatgatgtggatgccgttgcgctccatcaagatgtactgcttcatcttggggttccaacgacgggtctggtgaccgaagtggacgccggccttgagcatttcgctcatcgtgatctgtgccatagcactacctttcttgtcggttcttgcctggtcatgcgtacctgagtgcagccccgccgaagcgtggccgaccgacacaggccgtcgcggacatgacgcgatatggtgtgcaccggttgacgataacggttggccgtcgccacctgcgactgcggtgacggccgggttggcgcacaaatattcagaataccaccacgtgcctacttggcggcgtgctcacgcatgtaccgcaacgcctcgcggcgctccgtcttctccagccggtcgaggtacacgtgaccgtcgaggtgatcggtctcatgctgcagcatgcgacccatcaggccgctgccctccagcacgacctcgttgccgtccaggtcgatgccgcgcacgcgggcgtaatcggcgcgacgggtcttgtaccacaggccgggaacggacaggcatccttcgtcaccgtactgttcgccgctcttctcctccagcaccgggttgagcacgtatccgatcttcccgttgatgttgtacgagaaggcgcgcagcccgacaccgatctggttcgccgagagcccggcacgccccggatcgtcgacggtgtccagcagatcctgcacaaggcggcgtacggcgggcgtgatctccctgatcgtctcgcacggggtgcgcagcaccggatcgggaactgttctgatttcgcggatggccaattacttctcctcactggtgtcgttgccgtcagatgccgcgtcgcccacgctgtcctcctgctcggggctgccggattcggcttcgtcgtccttcatgaagcgaatcttccccttcgcctggtcgaaggcctgcttgacgctttccgaagactgcttcacggtctcggcggtcatgtcgaggatcttgacagtggcgggcagcggctttgcggcgttcttcggagcatagatcatgttgtcgatcacgtcggcgtaacgctgcagcaccttcgggcggaccaccttcatgctgggtgtcagagtgccgtcctcctggttgaactcctcgtccagaataacgaacttgcgcaccgactcggcgcgggagacgttgccgttggccttgtcgatgtactgctgcaccaacgctcggaccgcgtcgttggtcgcgatctcgctcatcggcgcgtcaatgtcgaggttctgcgaggcaagccacgagcgggtcatctccgcgtcgagttcgatgagcgcggcgatgaacgggcgtccgtcgccgatgacgacggcatgggcgacgatcgggcatgtgttgatgacatcctccatcggcgccgggctgatgttcttgccgccggccgtgatgatgatgtccttcttgcggcccgtgatgaacacgaatccccgatcgtcgatcgtggcgaggtcacccgtgtgcagccagccgtcggaggtcagggcctcggcggtccgctgaggctgcttgtagtagccaaggaacacgttcggccccttgatcatcagctcgtcgtcatccgcgagcctgatggagatgcagccgggccggccgacggagccgacctcgttcgcgtcctggaaattcaccaggcagggcgcggccgtctcggtcatgccatacccctggatgaaggtgatgccatcgaatccgttgaagaagtgcgcgagatcggcattgagcggggcgccgccgcaggcgagccacttcatgttggggcccagggcggaacggatcgacgagcccacggtctgcatgtagaagctgtgctggatgcgggcgcccagggaatgatggccgccggccatctcgtccttcgaccactgcacgaaatgatcgaacgccttggcgaacaggcgccccttgagaccggctccggccttctgcgaggcggcgttgtacaccttctcgaacacgcggggcacgcccagcagatacgtgggcttgaagccgcgcaggtcggcgagcagccgcttggcgctggagatatagccgatcacgccatgcgagccgatggccacgtactggatgtaccgagcgaagcagtgcgccagcggaaggaacagcagcagacggctcggctggtacagcatgtcgttgagtacctcatagccgttgtagaccgtgtggttgaagttgcggtgagacagcatcacgcccttcggtttgccggtggagcccgacgtgtacacgatggtgaacaggtcgtcggcgcggacgcggccgatcgccttgtccagttcctcgtcgctgacggactcgccgaaatcggcgaccgcgtcgaggccgttcgccttgaagttgaacacgtagcgcaggctctcgctgtgcgcgcgaatctgctcaaggatctgcgcatgggagtcgtcgccggcgaaggcgatgaccggttcgacctctgcgacgatatcacccgtctgcttgggcgaatcagtctcgtatacggggacgctcaccgcgccgatggaggcgcaggcgaagtccacgacgccccactcatagcaggtggcggcgtatatcacgaccatgctgccgggcttgaccccgaggccgagaagccccttggccacctcacggacgcggtcgttcatctggccggcggacacgtcatgccactgcctcgtctcatcgtcctgccattgggcgacgaggtcatcggggtcgcgttcgcaacgcttggcgagcagtgaatagatggtgtccaggtctgtggtctgatagatcgtatcgacggtgtattcacgcaacataggctccactataagcatggccgcgtaccggcacgcggccatgcggaacatatcatccggcttgcgcggcgtgtatcacccgatgtccgtcatcgtgcacagccagcggcatcccatctggcgcagcacgatgttcgaccagtagttctgcacgccgatggtcagatgcgtcgatatctcgaacgtcgtcggattgatgaacatccccgacatcatccggggcaccaccggcagataccggagtttggccttcagctcgggattcgactgcatgtggttgtcgagcaggtacgccatggtctccagcttcttgagacacgggccggtcaccgcccgtctgagcttgcccgcatgcagctgtccgcgcatgatgtcggcggacatgcatgctatgcgggcggacgataccgccagcgaatggccctgtgcggcgttgatgcttcccgcgccgcagctggtgatgtgatacggcaccggaacgtcggacgattctacgatgacgtacccgtcgaggctcggcaccgggcagggcgggttttcgcgcgcgtaatgataagtgggttgctccatgtctgtttctccgtcttctctctcgcccccatccacgatgaaaggggataatcccagcacaacacaacaaaggcacccccgcaatggacgagggtgcctttttgtgcaatcgtgccgcgattcgagcctccgacgcggaggcgaagcatcacggatcagacgtggtaggggttgacgaccaccgagcaacgctggaagctcttgacgtcgacatagcccgtggacgccatggctcggcgcagcgcgccgatgtagttcacctggccatcagcgcggtggctgggcccgaacaggatctgctccagcgagccgaccgtgccgacatcggtgcgggaaccgcgtggcagggtctggtgacgggcttccgcaccccaatgcttgccgccaccgggagcctcggtggcgcgggcgagcggagcgccgagcatgacggcgtcggcgcccatggcgagggccttgacgaagctgcccgaatcccccatgccgccatcggcgatgacctgcacatagcggccgccggactcgtccatgtaatcgcggcgcgcctcagccacgtcggcgatcgcggtcgccatcggggcgtggacgccgatcgtcgtgcgcgtagcggtgaccgcaccgccgccgaagccgaccaacacgcccgccgcaccagtgcgcatcaggtgcagggccgccgtgtagttcgcggcgccgccgacgatgaccggaacatcgaggtcgtagatgaacttcttgaggttcagcggctcatggccgagggacacatgctcggcggacaccaccgtgccgcggatgacgaacaggtcgacgccggcttcgaccaccgtggagtagaactgctgggtgcgctgcggggaaagcgcgcccgccacggtgacgcccgcatcgcggatctcatgcaaccggcgggtgatgagctcgggcttcaccggctcacggtagatctcctggatccgctcggtcgcgacgtcatcgggcagctgggcaatttcgtcgagcagcggctgcggatcgtcataccgcgtccacagaccctccagatccagcacgccaagagcgcccagccggcccatcgctatcgccgtggcggggctggtgaccgaatccatcggggctccgatgaccggtacgtcgaactcataggcatccacctgccacgacgtcgacacgtcctgcgaatcgcgggtgcgacgagagggaacgatggagacatcatccagcgcgtaggccatgcgggccttcttgcccaaaccgatttcaatttcctgagacatggtttcaaggctaatgccgggctgtgacaccggacgcggccgcacacgcgcatcacccgccgtctcacattgtggcgaataccgagcggcggacaacgcgcggtaacatcgatgcgctaagactggtgcacatacgccaatcacgctaggaggaaacgcatggccaaaatcaaggtcgagggaaaggtcgtcgagctcgacggcgacgagatgacccgcgtcatctggaaggacatcaaggaccgtctgatcctgccctatctggacgtcgatctggactattacgacctgggcatcgagaaccgtgacgccaccgacgaccaagtcaccatcgacgcggcaaaggcaatccagcgcgagcacgtgggcgtcaagtgcgccaccatcactccggacgaggcccgcgtcaaggaattcggtctcaagaagatgtggaagtcccccaacggcacaatccgtaacatcctcggcggcacgatcttccgcgagcccatcgtgatgagcaacgtgcctcgtctggtgcccggctggaccaagccgatcgtcgtggcccgccacgccttcggcgaccagtacaaggccaccgacttcaaggtgccgggcgccggacgcctgaccgtcaccttcactcccgaggatggctccgagccgattgagcacgtggtctatgactacggccaggacggcggcgtggcccaggtgcagtacaacgtcaacgattcgatccgcggcttcgctcgcgcctgcttcaactatggcctgatgcgccactacccggtgtacctgtccaccaagaacacgattttgaaggcctacgacggccagttcaaggacatcttcgccgaagtgttcgagaccgactacaaggacaagttcgccgaggctggactgacctacgagcaccgcctgatcgacgacatggtcgccagctccctcaagtggcacggcggctacatctgggcgtgcaagaactacgacggcgacgtgcagtccgactccgtggctcagggcttcggctcgctgggcctgatgacctccgtgctgatgaccccggacggccagaccgtcgaagccgaggccgcgcacggtaccgtgacccgccattaccgccgctggctcaagggcgagaagacctccaccaacccgatcgcctcgatcttcgcatggaccggcggactcaagcaccgcgccgacctggacggcacgcccgaggtccgccacttcgccgagacgctggagaaggtcatcgtcgacaccgtcgaaggcggtcagatgaccaaggatctggccatgctggtgggaccggatcaggcgtggctcgacaccgagggcttcatgaacgcgctggacgagaacctttccaaggcgctgaccgcgtgaccggccgggcggggttctccggcggctcccgccaccggtgatcgccgccggcaatccatcgccatcaaggcccgcatcccatgtccccacacgagatgcgggccttgtgcgtatggtgaggctacaatcgaaagttacagtattcgcatgactgaaagggcgtgaccatgtcaggacgacgcatggtgtcttgtctgaaactcatcgccgccgcgatggcgacaggtcttctgctcacgacggcgggatgcgcgtcaacggacgataccaacactccggacggcggcaccgtcacgcaatccaccggggcggtggcgatattcaccccatcggacggcatcaccctctcccagcacacgccgttgaacaagtgggcgaaactggtgcccgacatcacctccgagctcaagaagcaaggattcaaatccgcgaacatcaccacgaccacatccagtgacctcgccaagcagagccaggacattcaggattacgtcgtcaatcatgcggtggcggcgcaaagcgggaaagacagcgtcaacaagaaagacggtgctgacgagaaggcaataacgctgatcgtcgcgcccgcagccgaaacgcagacatccacccggcaatacggcgattacgtcagccagacgagcggcacggcgacggataggaccggttcagacgaggccggttcaacggatgcatcggaatcgactgacacacccgaatcggcgaatgcatccagctcggataacgcatccgactcgacggacacggaatcgatgccccgtatggcgaacgcattgcagctggccaaggactcgggcatgcacgtggtgctcgtggccaatccggtgaaggacttcacccccgacgctttcgtcgaactgtcgacagccgaacgcatcgggcagatccaggcgagcaagcttgccgacaaactgcaactcgacaccatcagcaaggacaatccgaaggccgtggagatcctgctgccctacaccgcatccgctgacggcagtgacgacgaattcgccaaggaggccttcgcaggcgcctggtccgtgctgcagccgtatttcaagaagggcacggcatacagtccgtccggactgctgacggccgacacgaccgacgggcagtgggagtcggtcgccttcaaaatcgacaaggattcgcgcatcaccgacgagatcaccaatcgtctcaaacagaagaattcggcctcgcacacccgaatcgacggcatcatcgccatgaacgattacgtggcttccggagtggtcgacgcgctcgaccatctcggatacaccggttcggcggccgacatcaacccctccatcacactgcccggaatcgtcggcaacatcaccggaaagcaggatctccaccgcaagaaggtgccggatccgatcaaggcgccggaaaacgacggcgacgccaccaacgacgggtcggcctcggaaaaggccagggacacgcagtggcccatcatcaccggatatggcgcgtacgtcgacgaactgccgcaactcgtcagcggccatcaatggatgaccgccgtcgaggaccgcaagggcgccgcgacgcagctcgcgcagatgtgcctgaaaatcaatcagggcacggcggtgaaatcgccgcagaacctgaccaaggggacgtatccgggcgtcgcggggaagaacatgccgacgctgcgccccgacctggtcgcgatcagcgcgtcgaacctcaagagcacgctgatcgaccccggctacatcactctggccgacgcggggatgtgacagccgcagggattgcgcgtcacggggaatgtagcaggcgcggcaataccgagatatacgcgagtcggccgtcaccccaaccatccgtcatgatgacgggaaccggttgaggtgacggccgactcgttgcccggctggacttccgctcagcggcccttcggggcgtaaatgcgcgtgtcgatgagttcgccgaagtggtcgatcaccgcttgacggcgtgccttcatgctggcggtcagcagtccgttctcctcggtgaacggctccggcacgatctcgaatttgcgaatcgactctgcccgcgacaccagatcgttggcggcgttgaccgcgcgctcgacctcggcgtagacgatcgggttgcgcacgacttcggcgaggtcggagacctgctccacaccctgcgcggccagccaggcgttggtctcatcgagatccagggagacgatcgccgcgatgaacggcttacggtcaccgatgacgacgcactggtccaccaccggcgatgtcatcacgctggcctccaatatgcccggagacacgttcttgccgcctgccgtgatgatcaggtccttcttgcgtccggtgatggtgacaaacccgtcgtcgtcgatgtcgccgaggtcccccgtgtgcaaccatccgtcaacgatctggctctgggtgatttcaggatggttatggtatccgacgcagaccgcacggctcttgatgcatagttcgccgtcctcgccgagccctaccgacaccccctgcagcggcatgccgaccgtgccgatgcgatatcccttggttggattcaccatggccggggcgcaggtctccgtcatgccatacccctcaagcagcggcagtccgacaccgttgaagaagtgtgcgatggccccgtccagaggagcgcctccggacaccgcatattcgcagtggccgccgaacacgcccatgatcgtgcgatagatcaggcggtcgtacatggcgtggcgcatccgcagcgaggccgagaacccgttgccctcctgctgcgcgtgcgaccattcgcgtgcggtggccgcggccttggcgaagatgcgccccttaatgccggcacccgccttctgcgaggcggcgttgtacaccttctcgaagatgcgcggcacggccagtatgaaggacggcttgaactcgccgaaatcagacagaatggtcttgaggttgttggacagccccagctccacgtcaccggcaaagcagtacagcaccatgtaccgcgcgaatgcgtgagccagcggaaggaacagcagtagacggcggtcacgcccataggcgatgtcgggcatggattgcgtaccggcataggtgacgtacacgaagttgccgtgtgacagttcaatgcccttcggcatgccggtagagcccgacgtgtacacgatggttgccaggtcgtcacccttcaccagacgctcgcgctcccagaactcctcgtcactcactccgcgcccgtattcctccagcgtgttcagcgcaccgaaatcgatgacgtacacgtctttcagcgtgctgcagcgcgagcggacggactcgatcttgtcacgctgcgcatcgttctcggcgaacgccatcgtcacctgggagtcattgaagatcgtggcgacctgagccggcgagttggtctcgtagacgggcacggtgagggagccgatggacatgatggccatgtccagcgcagcccattgccatgaggtggaagagatgatcgacaccgcgtcccccggcatgacgccacgggcgatcaggcccttggccagtgcgatgaccttgtcgcggaattcggcggccgtgaacgagcgccatgagccagtaccgtccttgtacgagaccagcggctcgttgggcttgcgttcagcgcgttcgaccagcaccgagaacacgtttttgtcgccgtcaatgggcttggtgaccggttgcgtatattccttgagcatttcagcactcccctcgactgtgggccggtcgttccggagaacgggtggcctctgcatcgccaccgttcaattgtacggcttttccatacgaattcggggcagcatcgccgtcaatcgggtttcaggccgatgcgcatgggtctcacacgggcgagcggatcaagatatgtcgtcgccgtcccctcgttttgcagtcggaccctcctgactccccaatggaggcatcggccgtcgcaatggtcggacgcccctcccacttcgccgatgacgtcgccgcgtctcacggctgttccggcaacgccctcggtatgcgccggctcgaacgtcgacacaaggtcaccgtggttgacgctgacgaccgacttgccgccgacactcccggcgaacgatatgatgccatccgcaggggcatacagttcatcgccgtcggatgcctgcagatccacgccgcgatgcccggaaagccatggccggtcaggtgggtcgaaatccgcgatgacggccggctgacccacaggccaaagccataccgcccgacacgccgcctgtcgtcctgcgcataacgtcaccgcggcgaagacctcttccccggcggatgcggagggcacccgcaatagcgcccagttcatcatcgcagcgaacatcacggcaacggacatgcagcacagccggatcatggtccgtttgcaacgctccctgcggcgaagcgcgaattgcctgcgccgtatggcatggcggtcataccgcacctgaggatggtgccacgctccccgctgcccatctaaatcatcattcagcatcagtctcttcccccattccgtcgtctgtcgccggaacgtccccgcgccccggcatccccagcatcgcacaccgatgcacggcggagggcgaaaaacaaccgatgtggtcgaaggctcgggagttatccacatttcggcgtgtcgcgccgatactgcacggcacttgctgctggaatcgcctgacaatgcccgatgattcgcggacgaaaccgtcgataaaccgataatttgcttgtgtccgcggcatccgactgtcagttctcgtcatcaatcaaccattggaattacaggcgacacgccgaggcgagcactcaagttgcatccatgtgatttgtgtgtaatatattcatcttgtgcacagcagttagctcagcacaggaaatcattcctgcgtagctcagttggcagagcatccgactgttaatcggacggtcgctggttcaagcccagccgcaggagccatagaaaaccctcaacggaaacgttgagggtttttgctttcccgcgctcattccgcacctgcgcaccgatgcatcgcatgcgccgtcgtgtgcgcgcctccgcgtgccacactatgcgaattctgatggtttttaagatggtgtggcaagggacggagacgagaacaatcccgaatcattgcaaaatggccgtcctatgattcaaatgtcggccataccgcgcgatgtgcaggctcacatcgcgcggtatggcagatggaaagccacacaatgcgattttgacgcgaaatatcgatggtgtggcaatgtggggacgcaagtgactatccgccgcattgctgaggatgaccaccccagtcacttcgcgacagctctccgggccctgcaagtggggatggcctgcggccacgggcctcgcggaggggctacatgcagattttgttcatgggcatggcggaatcgatggggcaatcgggtgcggaaggggcctcgccggcctctacgaggttcacgccgagcatggcgaccatcgcgccattgtcggtgcacagcttgagccgagggatgcgtacctcgactccggcccgctcgccgtattcgagcagcttcgcacgcagctgcgagttggcggagaaccctccgcctacgatcagagtcttggaatcatactgctcgcacccgcgcatggccttacgggccagaaccgtggccacggagtccgccagcgaagcgcacacgtcgtcaatgggaacgtcccgccccgccgcctgctgttcctcaatccaccgtgcgacggcggtcttgacgccggagaagctgaaatcatacggatgcgccgcaccggccttcccctgagtcaggccctgcggcaccttgatggccttgggatcgcccagctgagcgtgacggtcgatatgcgggccgccggggtacgggaagcccagcaaacgcgcgaccttgtcgaagcactcccccgcagcgtcatccaacgtggtgccgaccacgtcgacatgccgcgcgacatcgcgcacatgcagcagcgacgtgtgtccaccggacacgatcaacgccagcgtatccttaggaaacggcccgaattgcagctgcgtgacggcgatatgcccgatgacatgattgatgccgtacaacggcttgttcgccgcccaggcaagcgctttggcacctgaaacgcccacggcgagacatccggcgaggccggggcccgccgacaccgctatggcatccacgtcgccgagtcccaacccagcgtcggagagcgcctgggacacgcacggcacgaacgcctcggcgtgcgcgcgagaggcgatttccggaatcacgccgccataacgagcgtgctcctccatcgacgaggcgacgacgttggaacgtagcgtgcgcccctgtacgattgcagcggcggtttcgtcgcatgtcgattcgatgcccagtacgatcggttcgctcatggttgcgtctcctgtcctgtttgtttcgtcatgtcgccggcggcggacgtatcaccggcggcgacagccacaccgccattgccgctgaacccgacgatgcgcggttcaatgtcaagcgccatcacatacgcgtcgatgccttccggctggtagtaccgtttgcgcagtccgatgcgctggaatccgaaccggtggtacaacgcgatggccgggtcgttgacgacgctgacttcgagcagcatccgtctggctccctgtcgacgtgcgcgagatatcaggtgattcatcatcgcgaccgcgatgccctgcctctgatgggtcttgctgacgcctatgtccatgatctccgcgtcgtcgccgtcataccagtacccggcgaatccgcggatggcgggttcacggtccgtgtcgcgtccatccgcctcgtccacgtcgaagacgtatacgcgtgccggcgcgtcgagctcctgcctgatcgaggcctcgctccacgcatggttgccgaacagctcgacttccagcgcccttatcgcgccgacggccgtctcccgcccgatatcgtccagttcgcgcagcatcagtccgccctctgcgcgcccgcatggttcagcacgtgtttgagcgggctgggtacttcggcatcgggccggcgcagatacagcggttcgacaggcgcttcgtcgtcggcatgtttcagcgccatctcggcgaacatcgccaggccggccgcccccgcatccagaatggatccctcgaccaccgagccgagagcatccaggctttgccatgcgtcggcgtatcgggccgccccgtgaccgaccacgtccacgatgtatcgcatgccgccaatctccgcgcgacggcgtacctcggcgttgacccgctccacgatatggccggggtagtcgatgtccatagcgatccaatggcaggaatccgtctctgagcccgtcacgccagcctcatggttcagggagaagtacaactgtttgcgacgggcgtcattcacgcacagagtgatgtgatgttccggctccggtctcccgtccacctggccattttgcgccgtatgcgacacatccgcaaggaatccggccgcgtccgctatgacggcatcgccgcgcagggcggcgcgcaacacggcgtcctgtgggtcgaggatgttctgaccgatcagccgggcccccgtggcgaaggcgagcgccttggctgtgaccagccccgccctcagtccggtgaacggggccgggccgacgccgacgacgatgcagctgatgtccgcgggaccgagcccggcggcatccatcgcacgggcgatgttgacctgcagtttctcgacgtgggtgcgcgaatcggtctccacgatgggctcatgccccacgactcccacggtcgaaccgtacgaggtgtcgatcaccaacgtgcaaccatcagtcgcctgcatttgttcctcccgttcatatgcaacctgtacgagtctacatcgtccgtcagtcaccatcatcaggcggtcggggtcgtgaatcgcgagatgcgcgccccatcccacgccgggccgaccggtaccagcgtgacgactctggtgccatcgcttgtcggctgcctctccgcggttttgtcgtcctgcccgtcatcgagcgggcggtcgatatggacttccagacgttccggagccaacgtggaggccatctgctcgccccattccatcaggatcacggtgttggctccggggtcctccagctcctcgtcgagaccgagcgattccaactcgtccagcagtctttcctcgacgtcctgtccgggcgcataggcgtcgccgccgaggcggtacgcatcgacatgcaccaggtgggcgtgcgacccgtcggcgaatcgtccgtcaagttcgcgggcgatggtgaacgtcggcgacacgatgggttccgttatgcccaatccggcgccgatgccctgcgcgaacgtcgtcttgcctgcgcccagcgggcccgacagcaacagtacgtcgccgccgtgcagcagcaaggccacacgccggcccagttcgcgcatgtcgtcgtcggtgggcacgcgcacaacgacgggatgcgcggcgtcggctccctggttccgtgtcacgccggcgttgcccgtttctgttgtttccatcgtttctttcattcccgtccctgccgttcctgtttcaatttcgatgtcgtcgttcatgtcatgcatgctctgcgggcacccggccgtggtcgcctcgccgcagggcgccgttctccggcgcggtcagtcccttcctttgtggctgatcagttcgatgcacctctccagcgcgtatacggggtcgcccccgttggttttgctctgttcgtccgcccaggcgagcatgcggatgcaccgcccgagtcccgccgaggtccaacccgaaagctgtctcatggcgtttttcagcacccacgggttcgttttcgcctgggcctgcgtgatggtgccggccttgactgcggatgccttggcgatggtgcgcagtttcatcgcgagcgcgccgatcagcgcgatggggtccgttccctgttcgacggcggaacgcatggcgatgatggcctcggccgtgcggccggctatggccttgtccgccacggagaaaccggtcacctgcgggttcgaggtcaggtaccggttgacgagatccagggtgatggggtcgtcatcgaaatcgaagcacagttgggagcacatggcggccatttctccggtccgctcgccgagcaccgcgacgagctgctgggcggccaatggctcgacgcggcggcgctccccctcgaatatctgcagcacgaagttgagtttcgcctccggtttcttcaggtcggcgaccgtctccttgcacgcgcccgccttgacgagttggtcgagcagccgtttgcccttggcccctccttcatgccggcagatgacgatgctggatgcacccggatcggcgcatgcctgacggcagtagcgcaccatggattcgcccagcttgtcgtcggcgttctgcagattgtcgacgacgaccacggcgacatcggcgagcagggaagggctgacggcctcatcgaatgcgtactggtcgcagccggtcgcatccaggtcgatgcgctcggcgtcgggccgatcgtgcagcgcacggcggatgagatcgcgaccggttcgcttattgagatatgcgtcaccgccgaacacgatgatgaacggggcttgcgagcctgccttgtttgccatggtctccatcttcccatacagctggacaagagccgtcatgcgctcccgtcatcgatgcgacgggaatggctcccgccgcgactttcgtgcgcggcaccggccggtctcctccgtcggtgtcgccgtcgaacatcgttacggtctgcgaccaccatatccgtatccggtcacgcagacggggacggaacgactggccgccgtcgccggatccgtcggatcgcagcagacgcaaccatcgggtggccagtatcagcaccgtggcgcacgccgattcgaccaacaccatcagcaatgcacccggtatgccaccggcccacggcatggtcgcgaactcgttgtccgacaccatcgcggcgacgcgttccatgacggacgtgccgcatcccgcaatccaggccaagacgtatccgcattgcggcatcagccaggatatgaacagcgcgacgagccctgccatggtggcgaatcccacgaccgggccgacgagcagattcgccggcactgaggcgagaggcagttgcggatccatcaggatctgtatcggcagggtgagcgactgcgcggcgatggtcatggcgagcggagccgacagcaatcggggcagcatgcacgccagccaatcggtcaaggggccggcgaacagcacgatgcccaatacggccgcgcaggacaacgcgaaaccgtagctgaccgacatcgagggagcgatgagaaggacgatgatcaccgtccagctcagcgaactcaccgactgccctcgacggccggccgccaccgcggcagcgccgaacagtcccatgagcaatgcgcgcagcaccgaatcggacgggaacacgactatcgccagcatcacgtccgacaccgccatcaccagtcctgtcgcccatcgaggggcgagcacgcgggagcacagcctgtgcaccagccccgcgatgaccatgaaatgccctcccgacaccgccatcaggtgcatgatgccgctgcgccggaactgctcctcgagtagcgccgcatacgcggcatcgacgccgccgacacgttccgtccccgatgacaggccttcttcagacccatgtgacgccgcaccggatgcggtatcgcgcacccggaccacatcctgcccgagcacgccgacggtcagccccggcaccagcacgcgcgcctgatccgacaggcggtcgcaggcgcgcagtagcccctgctgcatggccttgacgatgcgggccgttccggaaggcgcagaaaccacatccggcacgcgcatatcgtcacaggtcagccacagcggctgacggccatacgacgccgtgctcagcgtgccgggaaaacggtagactgccgtgtcggtcagcgccgaacagacgtctcccgacaacagcacgcggatatcggcgcgcgaaggcaccggcgagcgttccgacagcggattcgccggggatcgccgtatggacagcgacaccacgcgcccgtcaacctggcaatcggaacccctcaccgtcgacgatacggccggggagcgcacccgcaccacggccaccacgtcggcgggcccgtcacgggcctggacatgcgccgcatcatgccagcgcacactgtccgcggtcaccgccgcggcggccgacagcagtccggccacggccatcacggccacggcatccccgagcgaggctcgcaacgggcgtatcagaccgtgtgccgccagcgacggcacaacgagggccaccggcagcagcatcacagccagcgcatcaatcgcataccccgtgaccgacatcgggtcatcatccatcaaggtcagccatcgacaccattggtgagccgccgccgaagccatccacgcggcgagagccgccggcagcatcctgaagtccctaccgccgttttcgcggcggatggcgaaggcccgcgatgacgggcgttcccgatgcccatcggtcgagtcgcgacgccttccagtatggttcctccgacggcggtcgtggcagccgccaccctgcatatgcccgtcatcccgcatgtaccgtctcctcatcccccacctcacacacgcacccacggccgtatcttggtgagcgtcttcgcgccgatgccggagacatccagcagctggtcgacgctggtgaacctcccgatgctgcgccggtgatcgagaatgcgctgcgcggtcaccggccctacgccgggaatggaatccagctgctctgcggtcgcggtattgagatcgatcctcgtatctgcggtggccccatcgtccgaaccgtcactcccccgctgcgatgatcgcccgttctgcgcagcctgactgcccgcggaggactccacgccgtctccttgcgattcggcgtcgcccgccccaccggaattctcctgatcggagcccgttccaccagagttcgacccgtcgccattcacggagtcgctgccgtcacttccaccgggtaccgtttcggcgatacccgtttccttccctcccgcgttctgcatcgcggcgttatgggattgagccgacacgtaccgcagggactgctgcagcagcatcgtcaggctcgcgcacagggccgtggtcagcaccagcatcaccgtcaccgcgtggaacgggcggaatctcagccgcggcacgtcccgcttcgcggactggccccgcatgccgtcgtcagggcgcacacccatcagacggcttattggctcgacggcaggcgcggtggaatcggccacgtcggcatgtttctcggtatgactctcgccatgcgacggcaccggtctggaaaaatcccccggtgccggcgccggaggagaaggcacgcccgttccggcatccgtcgcgacagatgttccgatcccgattacgtcgggcatggcaggaatcccggcgtggcggccatcgtccatgccgcgcaaccgccgagtcgccgtttgatcccctgaatgagaaatgcccatgcttccagcgtgagggaacatgggcatgaagtccagccgaatcggcctatgtggtcgaaggctcgggagttatccacattttcggcgtgtcgccggcggaatcactcggcggggacgatggagacgatcttcggggccttgacgatcaccttgtgcggcgtcttgccgcccaaccggtcggcgaccgcctcaagcgcctgcttttcgaggtcggccgggtcgatgtcaaccggcacctcaagcttggcacgcaccttgcccttgatctgcaccacggcggtgacggtgtcatggccgacgtacttctcgtcggcgacgggccacggctcggcggacagggattcgtcatgcccgagcttggaccacatctcctcgcagatgtgcggcgcgatcggtgcgagcatgaggatcagaggctcgacggcggcgcgcggcacagcgggcagtgaggtcaggtggttgttgagcacgatgagcttggcgatggcggtgttcggacgcatgccctccatctccacggtcacctcggcgatcgtgttgttgagcagcttcagggtcttgacatccggggtgtcctcggtcacgtgcgcctcgccggaggtctcgtcgaccacgttgcgccacagtcgctgcaggaagcgcatgccgccgaccacgttgcgcgtgttccacgggcgggactcgtccagcgggcccatgctcatctcgtacaggcggaacgtgtccgcaccgtagttctcgtacatgtagtccggggtgacgatgttcttcaggctcttgcccatcttgccgaactcgcggttggcgtgctcgccgttccacgtgaacgtcggctcgccgtcagccccggcggggccttccacgacctcgtcggccggcacgtactggccacggtcatcggtgtaggcgtacgcctggatcatgccctggttgaacagcttgtggaacggctcggccgaatccacgtagccgaggtcgaagagcaccttgtgccagaagcgggagtagagcaggtggagcacggcgtgctcgacgccgccgatgtacaggtccacgccgccctcgtcgcccgagtacttgttgtggttcgggcccatccagtagtcgaactcgtccttctcgaccatgtgctcggtgtcggacgggtcgatgtagcgcatgtagtaccagcaggagccggcccagttcggcatggtgttggtgtcgcgatagtaggtcttcttgccgtcgcccaagtcgagctcgaccttgacccagtcctcgttgcggctcagcggcgcctccgggttggactcggcgtccatcgggtcgaaggtgcgcggctcgtagttgggcacgtcgggcaggttgatcggcaaagccgagtccggcagcaggtgcggggtgccgtcctcgccatagacgatcgggaagggctcgccccaatagcgctggcgggagaacagccagtcgcgcagacggtagctgaccgtgcccttgcccacgccggcggattcgagccaggcgttgaccttggcgatggcgtcatcgacgcgcaggccgttaaggctcagcgcgtcgcccttggcggcggtggcctcgacggaggagttgatcacgatgccgtcgtgggagacgaacggggccttgccttcgtaattggccaggtcgtcgccggattcgggcaggggcttgacggtgtagatgaccggcagaccgaacttgacggcgaaatcgtaatcgcgctggtcgccgcccggcacggccatgatggcgccggtgccgtaatccatgagcacgtagtcggcggtgaacagcggcagcttggctccggtaatcgggttggtggcgtacaggccggtgaacaggccggtcttctcgccgccctcatccacacgatccttggcggtcttggcctcggcagcgagcctgtaggccttcactgcctcgaccggggtggcatagccgcccttccaatcctcgggaacgtcggccggccattcggcgggcacgttctccagcaggtgatgctccggggagacgacggcgaacgtggtgccgaacagggtgtcgggacgggtggtgtagatctccatgtccttgctgccgtcggcggtgtccacggtgaagtgcacggaggcgccgtgggattcgccgatccagttgcgctgcatgagcttgaccttctcgggccagtcgatgccgtcgaggtccccgatgaggcggtggccgtacttggtgatgcgcatcgaccactggcgcagctcgcgctggaagaccgggaagttgccgcgttcggacttgccttcggcggtgacctcctcgttggcgagcacggtgcccagccccgggcaccagttgaccggggacttggagatgtaggcgaggcggaagtcgttgaggatgtcctgctgttcggcctggtcgaggtcggcccacgccttgccgtcggactcatggccggggatggccttctcgccgcattcgaacttggcgacgagctcgctgaccgggcgggcggagcccttggagccggaggggttcacggcgtcctcgtcgtaccaggaatcgtagatgcgcgagaagatccactgggtccagcgcacatagccggggtcaatcgtcgcgaaggagcgacggtcatcgaaactcagtcccatgcggtgcagctggcgggacatgttggcgatgttggcaagcgtggtgacgcgcgggtgctgcccagtctgcacggcgtactgttccgcgggcaggccgaaggcgtcataacccatggcgtgcagcacgttctcgcccttcatgcggtggtagcgggaggccacgtcggaggcgaggtagcccagcgggtggcccacgtgcaggcccttgcctgacgggtatgggaacatgtccatcgcgaagtatgccgggcggccgtctgcgttgcggcccttgccgtccttgaggtcgccgttgacgttggcggcccagaacgtgcccttgtcatcccagatcttctgccatttgccttcgatgtcctgcgcgagtgccgcgttgtaacggtatgcgggttcggtggaatcggtggacgcgggttgcgtggtcttctcgttgtcactcatagacaaggattatcgccacgcaactggacaccatcctcacgcaggtcatggcatgccgcgcatccggtcgataatcgacgtgcgacgccgacggggcgagccgcgcgcagcccgccggccttcatcattcgtcgccctgctccgggtccgacgacgccgtgtccgacgatgccgcgggatccggcggattgagcttggagtcgacagtgtagccgatctgccggcgcatgccccgcacggcctgccgccacgtgccgtcgtcgatcatgtcgctcagtatgtcaccgatgctgtcggcgagctgcgtattcccgtgcttgaccgcgatgccgtatcgctcctcgccgaacggagccccgaccacctgcacgtacccgttgcctttcacggtcgcgaggccggtgaggatggcgtcgcccgcggctacggcgtcgacgtcaccgatgagcagtgacgtcaggcactgcccgtaatcgtcacgctcctcgatggacgccttgggcgcctggctgcgcacggcgtcggtcacgtcgctgccggcaaccacgcacgccttgcgcccgttcatgtccttgatgccggtgatgtcgcccgcgtcggcggccctcaccagcagatcctgccggacgattagatacgggccggtcatcgtcaccgccgactcatgccgttcggtgatgccgaagctggacaccaccatgtcgacctgcgcgctttccagcatggagacgcgggaacggggcgtcaccggcttgaagacgatctgcttgtccgcgtatcccagcgccttggcgacgtaacgggccacatccacgtcgaagcccgaatacccgccgttgtgccatacgcccagaccgggctggtcggaggcgacgccgatcgacaccgtgggcccctccggctgccgtatcgacacgccgttcgcatcatcccgggaactcgaggagccgcaggcggtcagggatcccgcggtccacagcaccgcagccagcgccgccgaaaagcgacgcatgatgcgccggcgccccgccttcgtgtgttgcagccctgtcatgccgttcccgtcatttgaacatgcgcgaacgggtcaggaaccacgcgacgacggcggagagcacgacggatatcgcgatgatcagcgtgaagccccatgtcttgccggtgaacggcatgcccagctgccccggcacgaagttcatgccgtacatggagaagatcagcgtcgggatcgacagcgtgatggagatgatcgtgaagatgcgcatcacgttgttcaggttgttggagacgatcgaggcgaaggcgtcggtcatgttcgcgagaacgccgctgtagatgttcgccatctcgatggcctgcttgttctcgatgatgacgtcgtcgagcaggtcctcgtcgtccgggtactgctggatgcgcgcgagcgtggtcagcttctccatgacgatctcgttcgatttgagcgacgtggtgaaatagaccaaggtcttgctcagctcaagcagcatcatgatctcgcggttctgcatggcgtgacgcagcttgaattcgagcttgtcgctttcgcggtcgataatgcgcaggtacctcaggtatgtgctggcgttgcggtagaggatctggaggatgaagcgcgaacgcatgaacgtgttgaaccctcggatcgttccctccatgaacgggtgcagcaccggcgtgtcctgcatgcatacggtgatgatgaggtcttcggtgacgatgatcgacagagggatggtctcgtaccagtcacggcccccgcgctcctcgacggtcgggatgtccacgatgatcatcgtgtaatcgtcctcgacgtcgatgcgcgaacgttcctcgtcatccaacggggcgcgcaggtcggcgaggtcgacgccggtctgctgggagaccgtggcgagctccacgtcggtgggttcggacagacacagccaggagccgttctcaggtttttcgatctgctccacttggccgttaatcgtgctgaacatcctcaacatgtagtctcacccacctctcataaccgaacactaccgaacatgaccggacccgcggcggcatgtcacgtcgtctggaagcctcaacaaggatagcccttatgccacgacttgcaaatccgccacggccggccccgccgccggcctcacccctcgatcggcttccacatcggcatgtgcgggccgtgcagggactgcgggccgttctcccaatcgcacagagcagcgaccgccggcccctggttgaatgccgtcatcatccattcgacgccgcccgaaggccggtataccggtctgagcgtcgaccagaacgcgttgcgcatgccatccaggttgctcaggttgtcggggtccatgccgagcagggtctcgatcgtggccacatgccatgagccgtgcccgacgagcatcagggtggtcggctcatcggcatgctccgcgttgatgccgcgcaccaggtcgagcaccgcatcggcgccgcgcagtcctgtggcggtgcggctctccacgccgaacgcgagctcgccgccggtgtggacccgccacgaatcataggcgtcggcatgctccgctcgaatctcgtcgcgggtcatgccctcccactgcccgaagctgcgttcgcgcaggcgcgcgtccgcggtcacgtccagccccagcatatcggcgaacgcgtgcgcggtctgcaacgcgcggaacaggtcggacgagacgacgaccatgcgtcgcgaggatgcggggacctgccggtattcctcgatgtcgctggatttcgccgcccccggccccggctgggccagcgtatccggatgccgggcgatgttggccaccttcgcccagtagtagcgtcgcgcaagctccgacgcgctctggtcggcctgccactggccgatgatgtcgaggggcacgtcgatctgcccctgcaaccgcctcgccacattgaaggcggtccgtccgtgccgcagaaacaccacttcgtcaatcatgttcgtccttaccgtcgccgcatgaatccgtgccatcacacatcctacaggcatcgacctatatccgatcggctgtaacgccgatgacggaatgcgtccggcgtcacgatgcacccgcgactacagggatatcgacgggaccacggccgccgggcgctcgtcgatcgcggacagtccgctcacatcggacgcgtagaaccgcgtgaggtcggcggtgaacttggcgaggctcgcctcgctgctgtagagcatgtgcccggccgggtagtaggcgaaggccacgttgcggcgcagcggcttcggcagcatcaggtgatcgatgtcgtattcggtctggaagaacggcgtgcacaggtcgtagacgccgttgccgagcagcaccttcatggtcggctggtgcgcgatggccgcggccagatcgggcagcacgttcggttgggtcatgacccagcccgattcgccgggcatccggtgccaccacatccagcccttgcccggctcggtggcgttccagtcgaagtcggcgaagcccttgcgctccggcacgcggtcccagccgagctcatcgcgcagataggcgttgcacaggctcgaatacgcggggtcgagccaggcgtcgtcgacgacgaacgtctcctcgtcgttcatgcggtcgaggtcgtagccggcgacgcggccatcgtagcgtccgacgatcttgtcttcgtcatgcagcagcgccttgcggaacctcgggtcggacacgcgcagattggaatcgtagacataccgctcgtccagtccggtcagctcggcgtatcggcgtgcgaccttatgccgggtctcgtcgtcaagcgagtccccggcggccagggcgagacgcagcggccccgcggcgaaggcacgggcggccttcagatgctcgtcgagcttgacgtccgacgcggctcggccgtgatatttcgccacggacgcataggacgggaaatatccgacgtagaattcgtcgatcaggtcggacgtgaacgtgtagtcgagcacgttggagatgagcgtcagtccgttcagcgccacaccgtcctgctgaagccggtatgcgagcgccgcgccgcgcgtggtgccgtaggattcgccgagcacgtatttgggcgagttccagcggtggtgtttgctcaggtacgccctgatgaacgcgctgaagccggcgacatcgccgtccaccgaccacagttccggcttggccgcgtcgaggatctcggagaatccggcgccggccgcgtcgatgaacacgaggtcggagacgggcagcagcgtgtgcgcgttgtccacgagcgcgtagggggcggccggcaccggagcggcgtcggggacgttgatgcgcttcggggcgatcgaacccatgagcaggaacgtggtggatgagcccgggcctccgttgaagatgaacgtgaccggtcgggccgggtctgtcttgccttcgccgtttacgaggtcgaacgcggtgaagaagatgctcgcggccttgggtaccttcggtgtgtcgatgagtatcgtgccgacggtcgccgcatagtcgagttcgccgccattgacggtgatgctgtgtctggtggtgtgctcgcatgcctccggcagctgcttgccctgggcgggtgccgccgcgacgggtccggcgttgccggcgttctgggtgttctgggtgttcgtgtcgctcatatctgtcgctccttggatgtcagtgcaactatacgccggccgggcaggccgtactggatcctggccatggtttgccgcgtcatcggcgccgcctattcggcggcgtcatccgactcgacggtaccttccggctcatctgcgccttccgtctcatcgatgccgtccagtctggcttcgtgcagcgtggtgtagccggtgtcggggtccttgcgggtcacgtatgccttggtggagacctccagtatctcgcccgtcttgctttcaggggcggagacgatgacctggaaacccagtctcggcagtacggacagcgcgcgccgcgtataccggccgtcggccttgatgagcgcctcgtcaaggaagagcgtcgtgtaggaaggcttgagcttgttgtccatgccgccgccgagcaggtagatcagcgccgcgccgtacacgaacgaggtcagctcctgcagggcgccgccggaccgtccgccggtcgaggtgatgcgttcgacctgcccgtccgagtggcgcacgagcgcgtagaacgaggatcggcaccgcgggtcgaggttgcgggcgccgtagcttttcacgccgttgacgtccctgatctgcccgatctcgcggcgcagcatgtcgatcatcgcggcgcaggacgcgaacgcgcaccgggccccgtcaagatcgtcgtccgtctgtgccgccttgcggtcgttgagggtgccgatcacgcgggtcagggccgaccagaacgcgcgctcggggcgccgtacgtccgcgtgcagggacaggctgccgtggtgcgggccgaactgctggccgtccagcatcgcgttgatgcgttccagctggtcgtggatgtctccggcgtcggtgtctatcgcgcgtttgatggtcaggaagctcatcagcagcttgtcgaggcagttgtggtattcgacggcggtggcttcgacggtggcgagcttcgaaaggctttccaactcgtcctggtaataccggtagtcgtccacgctggcggcgatcgtatcgtcaccgcccgcatacatctcgatataggcgcccatccgcgcctcgacggcggtgcgggccgatgccgcacgaccttcgagcatggagacgcgcgcctccaggtccttgccgatgccggcgatgatacggtcggcgaaggtatccccctgagccatacgctgcggcgcccccgcgccgatgatcatgtgggcgcgggtcgtcgcatcccccagaccggagagacgctgctcatatgattcggcgagcgcctcctccacctcgtccgtcaggagagtccgtccgttcgtgacggcttttggcgaaacgtccgccgcttccccatcgagcggccgcgtctgcggttgcggctgcggctgcgcggcatgctcgtcgagccatgcctgcgctgcgttcaccgcctgatcggcgagctcggcctgccgttcgatgtcgatgcgctggcgctgcgagcggtcgagctccttggacagcgactcctgcaacgtgtcgagttcggcgagcttgggattgttcctgaccgaggcgatggtgcgttcgatgtcggcgatcgccgccttcgcgctgttctcgtcgatcttctcccatgcggtgtatgcgagctggtcggcgagttcgcgctctcgctgcaggcggtcggcctgttccttcgcgctcgcgtacgattgcgcggtctcgtcgcattggcgttgcgcgtcctggatgcgcgtgcgcagttgcgccaaatagctttcgttgacgaatccgatgacctgctgacggtccttgatgccatgctggccgcgtttgccggatttgatctgcccgtcggcctgcacctgccgcacggcatggtcggagtcgtcgatgccgtcgacgcacagggcgtcgagacgctcggagctggtctgctcgcgcagccagccggcgaacggggaatcctcgcggtagcgtagcttcgaggacagccacacctctccggccgttccgccggtcgcacccgtgttcgcgccgccgggcccgttcccggctcccccgcgttcggtgtcgacgaactgccaggtgcgccgcgccatggcgtgcgggtcgatggcgctgaccttggctgcgaatccacgctcatggcgcttgtcgacgaggatggtctgggccatggatccgtatgcggcgttcatggcgaggcgccaatgctcctgatcctcgcgcacgtccatgagctccgcgacgtacggcagttcgctcgggcccagcccggtggcccggcacagcatggcgcgggtctcgtccatctggcgggagatgcgggtgcgctgcgatttctggcgttcataatcgtcgttcagccgctgcagcgtctgcttgacggacgcgtgcgcggcgtacgtctggttgcgcatgtcgtccagcagtcccttgcgctgctcatatgagcgcatgaacgtcacggcctcgatgcgccgctcgtcccacgcgtgctcgtctttggggaactcctcgccggccgcctcgaacatgcgcccgatgcgctgtctgccggcggtgatgtccgccagcgcgcgttccgcctgccgcatttccgcgtcgagccgtgtcaggtcgccgccgtcgaggcctcgcatgcgctcgcgcaccgcgtcgatgcgggtgcgcaggctttcgatgcgcttgccggcagcccgcgcctcactgcgtcgctcgtcacgcagacgcctgtcgagcggctgccgttcgttgacctcgccgatcatgcggcggatcgcccatgctcggatcgtcgccgagccggacttcgtggccgggttcaccgcgtcgaacgagtggaccgcgtcacgggccgactcgtagtcgccatagctggcggtgatggcacgcaacttgcccatgcgtctggtcttttcctccatgcttcggaagttcgcgtcgtaacgctcgtaatcctccacggtcgcacgggccaggtccagcgcctcgggcacgcccagcacgccctgtttgaagatgtcgtcaaggcgggagggggcgtcggccgactggatgcgggccagcagacggcatgcctccgcgctcaggcccatgacatcccaaatatgggtgtggaacgcctcggcgttcgggaaggtgacgcaccccggatacgtggacttcagctgcgtgggcgtgaacggcgactcgcggaacacgtccatgcggcgcgggtcgatcggcttgtcccatgccaggtacagccgtcggacgtcgccgcgcccgtcgccgggcatcagatagaggaacttgccgcaggacagtatctgaccggtggtgaagttgcggtaggtgtcgacgatcgcgccccatatggaccggggcgcgccggactcgtcccggccgcgcaggtacatcggttcgtcgacgccgtcggagcctcccacgccgatcatgccgcgcaggtaggtgtagtcgcttcgttccgaacgccccgaattcgatgccttgttgaagggcgtgccggtcgggtagagcagcgatatctgcgcgtcgaccagcgtcgacttgccggattcgctcgcgccggcgagcaacgtcaccggcagttgcgagtccgtggagggacggaactcatggtagccctcataggatccccagttgacgagcctcctgctttccatcatccatcggtcggcgatcatctgcatgtccttgccgctcatcgtcactccccttcccgtgcagtgccgccgtccgaggcggtctcgtcgtcaatgtcgctgtcgttcgcgccattggcatcatcggcgcccttgatgttctcggcggcgtccgcatcggcgtcgtcatcgaacagcggagcctcgaacagttcggcgtcgggtcccgcgtcgtccgaatcgccatcgtcatcggcgccgctcgcatcggcgttcgacgtatcgccggctgcagaccgcgagccggccggggccatgtcaccggccggctcgtcatcgtcgtcccggtccgcgactgcgagccagctgtccgccagctgacggtccagcaccaccggcaccagcggcgtgatgcggtacatcgtctcgtcatcgtcgagctgcctgagatagccgtacgtgcacatgacggacacgatcgcgcccacctgcctgagcacgccctcctcgtcgttgcgcgaggcgaggtacccggcgccggtggcgagcgccgctcggatctcctcgaagctgaccagccattcgtccggcgcgacgtgggcgttctcgtattcgagcacgcggatgcgcaggaacgccagcagcgccgcctcctcacgtttgaggctcgcacgggtcttgagcgcgcgcagcgtcatgtccggcccgctcaccgcggtggcgtacatgacgcggtagtgctcgttgacgaccagatcgagcaggtcgttgttgagcgaacggatgaccgccgcgcggttgtcgagcgccaggtcatagaaacgtccgctgatgtagcgctcgcgtttgagcatgatcgccaccatgcgcgcgtcggcggtcatgtcgcccgtgtcgccctcgaacagggcgtatgggttgaccgcgccttccgcgtccgcgccatcgtattcgacgtccaccgcacccatgtcatccgcgccggtactggcactgtcggtatcggcactgtcggtgccggtcatgtcgtcgtcaatcatgtccatgtccgcgtccggctgggcggtgtcgttcgtcaggtcactcatgtcagtcctccttcacgatgtcgtgcaattcatcctcttgtgcgagcactggaccggtgatccagtccctcgggcttccgtctgccgatatgcaatgccatgcgacgccggctccgtccccgcagccgagctctcccaggaaaccgacgagctcgctttccttccgctcggctttcggcagcccgttgaagctggcgacgatgtcgatggcgccgttcccgtcgtccgcgtagacgggcgattcgaagatgagcgcggccatgcgccgcagccgcggtcccccgttgtcgatcatcgaacgcaggtcgggcgcggtcgcatcgcccggtgtctgcgggacggacaatcctggggtggtcgttcgtaccatcgggcgcgcggggcgcgacggcagcggagggaacctgccggccgcggtatcggtccggtacggtctcgcatcgtcgccctgatgcgccttcgcgtcggcgttgatgtgggcatacagacggttgagcttgccgagcatcgtgcggtatcgggtatcggtctgctgtcgcaccagacggctgatcgcctcgtcggatacgcgcatctggcgacgcaccgcctcgatgccgtcatagatgcgcgaaagctcggcacgcacctgatcgagcaggacgccggactcgccggccagatacggcgtgtgggcgatgtcgcgcagggccgcgtcgatctgctgccgtccctcgtcggtgatgatcacctggaacgcatcctcgaagcgtcttccgctgtcggactcgctgaaggacctgcggtattcgtcgtggtacgaggtcaggatgtcgtcgacgctcatgtcgcccgcctgcatgcggcggcggagcgcgtcaccgttgtcccgttcggtcaacacgagttcacgcaggtctatgggcacgccgcgcagcgtgttgtgaatcactgcaatcacgtcctcgacctgcgattcggtgagcgccgcctgccgctgaccgtggcgtatctgacgtatctcgtgtttgcgcgccttgatctcccggttgagcaacgccacgcgctcgccggggtcggcggtaagctgcatgcgcgcatgctcgatctccatgatgatcgagttcgcctgcgcgcccgacagcgtgcgggagtcatcctcaagccgcgacagcgcctcgatcgcacgatgggcgcgggcggtgagacggtacaggaaccggtgcgatgcggcgtcatgcgagttggcgagccatgcgtaatcgtcatcgccctcacgggtcaggtcggcgaggatgcgccgggaggcgtccgcgatggtctgatcctccctgagctggtattcgccggagtcgacgagccgggacaggctttgcgagaagctttcctccagggtctcacggggcagctcgccggtcaacgggtcgaaggccgcgcggagcagcgccacgtacatcatcgaattctgacggagcagcagtctcagcacgccggtttcatagaccggcctcagccgttccatctcccgtcggatatcacccacgaaaggcctctctttccactcgtcctggctcggcgcgcgtcacgttcgccggacaaaccacgctagcacaagacggcgctatcggcgtctcccgtcgcgtcaccgccacggagaacgcggccgcggccactggtacgctcactgcacgagaccgcgcaacagggcgatctcctcgcgatgcgtggtctcggtcagttccttggtttcgaggatcatcggcaaccgtgacagacgcgggtcgttgaccattctggcgaagaacgggatgccgaggcggccgtcgccgatgttggcgtggcggtccttgtgcgatgacaggccgaactgggagtcgttgacgtgcaccgccttgacgcgttcgagtccgatgacgtcgtccagctgccgcatcacgccgtcgaagtcgttcaccagatcataaccggcgtccagcacatggcacgtgtcgacggtgacgcccacgttcgccttgtcatcgacgccgtcgatgatggtcgccagctcctcgaagtttcgcccgcattcggtgcccttgcccgccatcgtctccagcagcaccatgatgcccggctccagcccgaacacgcggttgaggccgtcgctgatcagagcgcatccgcgatcgggcccttgccccacgtgcgcgccgggatggatgttgatgtatatctcctgcccggtctcacggatcggcgtcagcagtcggatgtcctcggcgagcgcccgtatggcgaactcgcgcttgtcgggatccttgccggcgaggttgtagacgtagggagcgtggacgacgagcgggccgtaatgctcggccgtcaactgccgcgcgaatgcgacggccccggacaggttgagcgccttggatggccgcccgtacggtgagcgcgggaagaacgcgaatgtggtgccgtgttcctcatgcgagcgtttcagcagcgcgctccacccgcctgccgtggacaggtgcgatccgatatacagttccttcatccgtgttgtcccttcattcgtatcgtttcccggcgatggttcccggctgtcgtggcgggtcggcgccgttttcatttcgccgcagtcgcatcctcaagataatcgcgcagcaccagggcatgattgacctgagggtccttggcggcgtacagcaaggtcacgtcgggatactccgcgcagatgcgcagcagttcctcggcagcagcgttggcatcgagctccgcgatgtattgggcgcgaaattccgcgaatctggcgggatcgtgcccgaaccacttgcgcagctggggagagggggcgacgtccttcatccacaggtccaatgccgcgcgctccttcgtcatgccgcgaggccacagacggtcgaccagcacgcgatacccgtccggcgcctccggcgactcatatatccgtttgattgcgatgcccatgcgtcccatgattggcttgcgcccgcgggatgtcaagcgtacataacgcaacgggatgccaaaacttggagatacgaccgttttcggtgggaaaggccccctatctgcgagttttggcatcctgccgcacgacccccccctgatacgggggtgttatccttgcctgtacccgacggacaaacgaacgagaggaatcgccatgaacaccatcgagaccgaacgactgctgctgcgcccttggaaggtcgatgacgcggctgaggcggcatcgctgttccggtatgccagcgacccggaaatcgggctgagatgcggctggccgccacacaccagcgtcgaaggcagcatgcatgacatacgcaatatcctcgcggtcgaaaacaactgggccattaccatcaagggcggcgcgccgaacagcaacgcgcctgtgggcagcatcgcgctcaagcccgtcagccaccgcaccgccgacgccgttgccgccgatcctgaactcaccaaacgctacggcaagtaccttggcgacagcgcgctggaactcggatactggatcggccggccgttctggggcaagggatacatgcccgaagcattgaccgccgtgctcggctacgccttcgacacgctgcgcaaggacgcggtatggggcggccactacgccgagaacacgcaatccgggcgagttcaggccaagtgcggcctgcacgtcgtcgccgagtcgaaacaggattatttcccgctcatcgaccgtcactatgactgcgtctaccgcatcatcaccgcgggcgaatggcgcgatgccgaacaccggtagatggcgaggtgatcgcctgattcacgaacgggcgtctctgcggcaacggcatataatgcaagacatgacgacccgcattgttcccatcgagccgcagtggttcatgcagaaggccgaagtccaatcgcgtacatggcgcgagctcaatcaggggcatagcccgcaggacatcgtggatgcgatcaccccggcattcgcactcaagctgacccgtggccacgccgccgaccccaaccaggttgtgctgatcgcgttgactgacgaccgtgtggtcggattcatcgaactgctgcgcactccgcggcccccgatcaatcggcccgaggccgcggaactggcgtcattgtacgtgttggaatccgagcatcgccacggagtcggccgcgctctggtcgaagccggacggcaggcagtcggcaacgaccggctcgtcttgtgggtcgtcggtttcaacaccaacgctcagggattctaccgacacatcggattccacaagaccggactgacccagaccgaggatatggggccggaactcgaaatgatcaactactagccggccgctggtccagctgtcgttcaagctgctgtgcaagacgctgaacgtgaatgcgagtggcctcgttggcgaagtctgcgcacgccttgctgccgtacagcgccgctccacacggatcggcaaagcgtgggtcgccgcacagagcggagcggacgacgccgaacgtgtctgacaacggcatggcggcctgttcttccgcatcctgcggcacttgggccttggcggccttggccttgatattcttatccataatctgcgcggccagccgttgcgcttccggcgaatccgacgtgactcccgtatcgaacaaccgcctccattgctcggcatcggcgagcatggaatcctgcgactgcctcagtcggctttcgcgaatccgtgagagccgactgcgctcctccgcatccagccgcgcccatcgctcggcggccgcgacgctgccaacaggatagatctttacgcggcgtcaaccgcaagacgtgacacgcgacgagtcgaaagattttgccgttctcccccgatccaggacgagaacaccgaacaaatatcattcccctcccggcatgaccgacaatcagatcatgcggaccgtaccacaccaggccattttcacccgaatatgacgtggtgtggcacgcggcggaataacggcgaatgacggcgaatgacaaaacgttgcaaaatggcggttccgataaatcaacgctggccacaccagcgaatgttaaggagaacatcgcattgtgtggcagaaccgttgccacacaatgccgatctgggtcattttcgcgctggtgtggccatgcgctcctcattcaggtctcagcgtgacaatactcgcgcacagtgatgggattcactcgaacagcgtcacccagtcggggtcgcgatggccgcgcgagtatcgagtttcggcgtcgggtatccggcgctgagcggccggcgcatctcttctgccgacacgtcggcctgcatggcgagcatgtcgaccgctatcgcgcggatgcgctcgtaacgctcccgatcgaggggatccttgcagtacgccaatccggtctgggccagtgcctgcagctctctggcctgctccagcaacgtgcggtctgcggcgatcatggtccacccgtcctcccatcgcaaggtctcatatccgtctaagctcagccattacgacgtaattgaccgtcagcatgccgattcccgactcagtttccatcatgcgtaccactcgggccgtctcagtcccagaaacggacgccgtttgcgggccaccgcggtctgagagatcaatgtcggcaatgaaaggaggatgccggcaaggatctcggcatcctcaacctggccaccacgctcggccaggcggtggggccctccatcacctcggcggtcaagaccgtgaccggcacctctacagcggcatttgccatatccatcgtcatggccccgtgcgcggtcggcttcgtgctgagccttcgaaaagtgcgatagccgtgacggcttggatgagattcgagaactacgttctgatcacgccttgccacccatcatgtcaatcgtgcgcccggcacctgccattatcgtcgaaaacagcaggcccggactgactgtaaggtgattgagcagctggacatcagcttcggttcttgaatcacagcggcttgacgaaatcctcgccgttgaaacagccggcgatggcgttgcattcgacgacgagtcgcggatcgatggcgagcgtatgatatgaatcttcagtacctcagtagaccttgccgtgcgcgagcagccgccggtccacatacatcggcaaaccgttcaaaacagcgggccgaccgtgccgacatcatagccggtgcggttcttgaccacatccgtcgcggcgagatgaatctgacgcaatcccagctcgcgacccagttgccgccacttgagatgtgcggccgcgctggtgactacggcgaacacgccctccttggcctccacgatatacatggctgccgcctggttgatgtcgaacacctgtgcgacggacatcaagtccacgatcgccgtctcatgctcgatgagctcggcgcgaccgccatgcgcggcgacaaattgcctgatcacctcatacttgctgttcatagccgtctgccgtcttgtttgccattgagtccaacagtcgcacgaccttgaaatgctcgaacaccacaagagagtcatcgttcagcggaaaatccgggtcagcgaactcgttgcggtattccggcgcgttccagaaggactcgtgggtatgcctccacgcggcagccgtggtgtcgccctcgccctcatcgatggcgtgccggtcggtgatcttcccaagcggaataacatcaaccgcggtggtgacgagtatggccaccggccgttcactggaatccaccagtgccgagcgttcgccgacctgcggcagcggttcgtcatcctcttcgtattcaatcatcaatgcggcggtcgcggtcttcgttccggcaagaatgagccctaccagacggtcacgttcaggtccggggaacatgaattccgccttgggcaggttccctggttcgggtgccgtgctgatgcgtgtatagtattccagcccatcctcgtgatcgatgtgagccccgcaatgctgctgcaccgcaagacttgcccggttgtccttatgaacgctcaggtacgcctcgtcaatgccgagctcacgcgccttgtcgagcgtgagccgcaagccgactgtggcatatccacggccgcgatattgagggacgatgccatagcctatgtgcccggctccgacacgcagattgtcgttcaggcgatgccgcaaattgaagattcccacatacgcaccctcatcattgatgagaacgtacttgctgctcggcacccagccaggctgcagaccgatgccacgcgattgttcttcaagctcatgcacatacacggcgaaccgctcgcggtccatgccggccgcctggttctcgaacccgttctcgtccgccggaaactcagagaacagctcaaacgtccgctccggatccgcccgccacacttccgtcaaccgcattctcgccctttcgtttccgccatactagcccacccggataacagggtgcggacgttttcttggagactgggcaaaaggatatcatatgtccgttgccgggcggcatgcggcggaagcgggccgccgaactgttcggcgcgggcgccgggcggccggggcgttcaccgcttccgagggcgggtacgggtaccgaagggtcaaggccatgctccgaacccgcgtctcggagaaggtgctccgcagccccatgccataacctgcaccgtccaagccggcgaaaaccacaccatcatcaccatcgatagcaccaccagacctccagaaaacgccgcggacgcagaggacctgatccagccgttccaccgcggcgacgacacccgcatggccaacaggcccgggcacggactcggcctgtccatcgccaaggcatgcaccgacgccatgcaggccacgctcgccgtcagcaggccctcacccggcaccttccgagccgaaatcaagctaccgaacaggccgacgcagcgccattgcccgcagcagaaggaacatggacaccgccctcatgccaggcaataggcataatcctcctcattcagccccgtttgcatcgtccccgcgacgtgtgtggcggtcgcagttagacattctcggcgcacagattcttatcatagactggacgaatgtgtaaaagattcgcgctcgacctggattgggacgccatcgcggcgcaattctcggtggccgaggaagacgtgcgcggcgacgttctcccccgcccctcgtacaacatcgccccaacgcagaacatcgccgtcatcgcgcagggcaaagacgggcatcgacacctgaccggcgcatactggtcgctgattcccagctggagtcctggcaagaccttgccctaccccacctacaacgcgcgggtggaatccgctcacgtcaaatccaccttcgcggaatcgacccgctcccggcgcacgatcattccggcgtcggggtattacgagtggagggggcggcgcccgttctatttcagcccggagatggaatcgacggcgcttgcgatggccgggctgtattcgtggcggcggccttccgcggcatccctatggcagctgacggcgacgattctcacgtgccctgcggtggatgggccggcgacggtgcatgaccgtatgccgctgctggtgccggccggtatgacgtccgagtggctggatccttcaatcgacggcgcccgtctgctcgcgccgatgcgcaaggccggtgccgagctgtccgcgcggctgcatttccatgaggtcgctccgccggagggcgacgggccgagcctgatccgtccaatcaaccgcgaggagcccatgcggctgttctagttctgccgcagatcggcgcttcttccccgatacggttgagcgcacggccggcacgggcagcctccgccgacaggctgagccgcggcggacgacggagccgcgtgtagacgaacgcaacaggcgtttgcgtccttaagtgcgcgccgaaacgacgaccgcgcgcacttaggaacgcaaacagggccatttgcgttgctatgtgcgcgcacttgccggttcggcgcgcacttaggaacgcaaacgcacggaaaccgcgactcatcgtcgacagcccaagccgactccgccattttcaccggcccagccggcccaaccaatccgtcatcttacaccggcccgaccaacggtgggcatataccctgacacaggaacattcggtgaaagccaacggagggggattcatggacgtgtcggacgtcatcgcgcggcgggagttcatgccgacgtacatctggctggatgtggcgtttctgattggtttcgcggcgttgctggtgtggcgtcgcagatacatgacgctgctggtcggactggtgatgggcagcgtgtatttcgccgtgggctatggcgcgttcaatctgctgacgcattcacattcgatcagcggcggcagcatgttctgggtgctgctgtggatgagcgtaagttatgggttcacgaacttctcatggctgtggttgtggctgagccgcgaccgccatctggcggaatggtcgacgctgattctcgtctggtggttctgctgcccgttgatgccgcagacgtttacggcccggttcgcgtccggcatgcagccgattgtcatccaacgcacgaccggcgcgtaccacgggtagatggccgtcatcctgtcgcgcaggcgtatggtcggtcatgcggtgtgccgccgatcggcatggatacctgccgatcaggctcgggaccgtcgaagatatccgaaacacctgatgtacgaacgtaccggcatcagcccgacgctgttgtacagtcgtacaacaatcgttcgcaccgcctgtcagcgatggttttcgaaccatcccgcccagtcgacgacggcctcgatgttgttgccgtccggatccagcacgaatgcggaatagtaccccggatgatacgggcgcggtcccggagtgccgttgtctcggccgccgacggcgagcgccgcggcatggaaaccccgcacggcctcacggttcggggcgaggaacgcgatatgcgtgggcggcggcgcgagcgcggcatcatccagcggggacacgtagaagtcggagtgcggcgtcccgtcatccacgccgaaacccaacgtgggctcatggtgggccttgacgatgtagccgagtggcgcgagcgcatgctcgtagaaagcgatgctgcgtccgacgtcccgcacatgcaatgtgatgtgatccaacatacctgccactgtacgcgcagcataagtcacatgacagcagtattctatccgcttgttatccgatatcatccgcccaaagtcccatctcgggcggagcaaatgggactttgggcggatgatggggcgcttcgcgggatggccgggacggcggaagacacgacggccatggcaacgggcacggcaaacggccagggcaggcaggcacgcggcggccacggaacatgcttctcgccacgccccgcacaaatcatcctgcgggatgccatggcatcgcagcatcatatggcacgatagacacgtaacgacacgcaaaacagatacactgcgtggaaacgactctggaggtgagcagatggccggacgacgaacggctcggcgaacgcgatcagtctcgcctcgtgatgggcaaccgccgatccggcatgagctgtcgccgacatggcacgcacggcccgccgcgcgtcgggaacggccgcgtcacggcatgcgacggaccgtgatcatcgtcgcggtgatgctgtgcgcgaccatcgccttgttcgcctcgattccacgactgatgcgcttcgtatggcccgcttccggccctgaaccacgccgggcgtcggacgcctactgttccgcgacgctgtcttccggcgacaacaaggaaatgctgtccgttgaacaggcattgaacgccgaaatcatcacgagggcggcagtcaaacggggcctgcccgatcatgccgcgaccgtcgccatcgccacggcgatgcaggagacgcggctgatgaacctgagctacggcgaccgggattccgtgggattgttccagcagcgtcccagtcaggggtggggctcgaaagagcagctgatggacgagacgtatgcggcgaacaggttctacgacgagctggtcaaggtgccgaactggcagtccgtccccgtcgaggatgcggcgcagtcggtgcagcgttcgcaatatccggataggtacgccgactggaccaatcttgcgcagacatgggcggcgggtctgaccggcgagaccggcgcgggtgtcgcgtgcgcgctggagccggcgcagccttcggacgcggacatggatggtctgaccagtgatttccgcaacgaattcccgaccgtcatggtatcgcagccgtcgagtctggagccttcctcgaagacgcaagacgacggcggcgacaaggccgccgacaattccgcggccaatgacggctcgggcaagaccacgtccaagacactgacgttcacaatgtcggccggaaccgacaccgaaaacgggaaaaggctatgccgccaagcgacggcctggctggtggtccatgcacggcgctacggcatcgattcgttgcgcgcgaacggcatgcgctggaaccgcacggacggcgtgtgggccggcaccgagaccggagatctcaccatcacggcgacgctggcctgattccggccgctgtcatgacatccacacccgccgcccggctggtataagacacctggttccatctcacggacagcgcgcacagtcaacccgtgcgtgcagctcattcgcacatcgccggcgagcccggcaaagcgagacgctgcgcgacacgcccgaattgcgtagcagaactgcaagcacgcatcccggaaaacggccttgttccgtcattcccgcagaacatgtaagacagtcctgctacacaattcgggcgtgtcgcacgatgaacccctgtcagtcactcactcagcgacccgatttcgccgcgcggatctcatcacataggcaccgatcggaacggtcatcagaccgccgaccacgaacagcagacgtacatcgaccacatcggcgagcgggccgaacacgagcatgcccgcaggcactccgaatgccgagactgagatcagcagacccaatacccgcccctgcagggacacgtcgctctccttctgcatgagcgtgtacgtgggcgcggcaagtctttcagcggaattggagagcacgacgaaaccgaaatcgatatggcgcgcaggggcgtcatccgagctctcccccggacgacgaagacgggcatcatccaaacgaatcagcgcgacgaagcctatgccgacaatcgccgtggacacgtcgacgagcatgatcatccacaatggcatcagattgacgagggctgcagcgattgcaggagaggcgatgctgatcgccgtctgcaacgtaccgttaatcgcgttgacgcgcagcaaccacgcctccggaacgatctgcgggatgaacgattgcacggccggggtctggattccgccgcctaccgaacgtatgaccagaacgacaagaatcagcccggtatcgccccagccgacggccatacttgccgacaggcatatggtcacggccgcgatgacggcatcgggaagcatgaccaacagtttgcggttccatctgtcagcccagacacccccgaacacggagacgattgcctgcggcagggcggcggcgaccatcgctccggtcatgaccatgccggagttcgaccgcaagaccaggtaccagaaaatagcgtattgcacgacgctggagccgaacagcgacagcgtctgtccgacggtctgccgtccgatacaatgcatcacagggagagccgtccatgtcgttcttgttccgacgccgcgatcctggatcacggcatgtctaccgctacgggccgctgcgcatcacgtgcgtcgacagggacgtgccgatcgacgtgcgcgtcaacgcccatctgatgtacaaggtcgtgctctcttgggaggacaaggcccgatgcgccacgccgttcgacatgatcgcccgtgatctcggcgagttctggctactcgaccagcggcccactggtaggcttgcacggctggacccgttcgccgctcaattacggttcgagcagaaccatcctgcgactgttcaccagcgcattcttccatgccgcccatgcccgcaggccacggtatgtccagctgctcgatgagcaccgacacgccgcccaccaccgggcgcagcccgtcgccgatagactggagcgatgggcgaatcgaagaacaaaccgccgttgcgcgcacgctggaagaccatggaagccgccataggcatggagatccgggagcacaaaagctcgttcgcggtgtatgtcgtgttgcgcgtgctggtgatcgctgtcgcggtgctggagttcttcaacggcgactatgaggccgtgttcctgtgcatcctgacgttgctgttgctactggcgcccgcgttcgtccaagtacggttccgcatcgaactgccgtccgcgcttgaggtcatcgtattggtgttcgtgttcgcggccgagatcctgggcgagatcagctcgttctatgagatcttcccgttctgggacacggtgctgcacacgatgaacggcttcctcgcggccgccatcggcttttcgctggtcgacctgctcaaccgttcggaccgcgcgaagttcgagctgtcgccgctgtacctggcgattgtgtcgttctgcttctcgatgacgatcggcgtggtctgggagttcttcgaattctcgatggacatgctgttcggattcgacatgcagaaggacgccgtcgtgcattcgatcagctcagtgatgctcgatccggcccacgccaatcacgccattcatatcaacgacatcacgcaggtggcggtcaatgggcgcgacctcggccttggcggctatcttgacatcggcctgatcgacacgatggaggatctcatcgtcaatttcatcggcgcggtcgtgttctccgtcatcgggttcatctatgtgaggaaccgcggcaagggcgtttccgtcatcagccggttcgtaccccgacgcaaatcccacgaccgcgattacctgcggcttgcgggcggcgacggcgatgcgccactcgcgccgggagcgcaggctcatcaggcgcaacgccagtcccagcacgatccacaccaccacgatcacccatgatgcgggtttgagcgcggccggggagaacggcagcacctgcagtccgatgatgacgagctcggccgcgatggcgagcacgatgttcgccgtcttcggcttgccggtcttgcggtcgatggacgcgaagctcttgggcaggtagccccgccctctcgactgggcggattgtgtgttcgtctacgcgctcgcaggtctgatcggcaccgtgcacaagaccatctgggcataccaggccaaaggcatgttcgagtaccgcaacggatcgatcctcacccccttcaactacgtgtacggtatccgcgttggccatcgtcatcgcgctgcgccgtatcgaccgggggtggaaggtcgtgctggtcggcggtctcgccggcggcatgctggagttcgcgatgagtctgatccaacagtatctgctgggcagccggtcatggaactatgcgaacgagccgctgaatatcggcgggcgcaccaccgtcccgttcatgctgttctgggggctgttgtgctatctgatcgtccgtttcatcctgccgctcgtcctgtggctcgtgcatctcatcgacgacacgtggcacacgcggctcgcgaccatactgctggcgtggattctcatcgacgccgttggcgcgctgcccgcgatcttcctgtacgggcagcgcgccaacggcgtggtgttcgacaactggttcgcgcagcatatcgagcggctttcgatgacgacttcatgcgcctgcatttcccgaacatgcgcgtgtgagagccaccgcgggtcgagcggcaccatatatcggccgcaggctcgttcggcggtgatggcttatgggcgtcacgccaggctggcgcccagttgacggatgccttcgagttgggccgcggcggccttacgcttgtcggacgaatcgtcgcccatggacaggttgtcgacgtacaccagctcgacgtccttcaccccgcagtacttggcgaaggtctgccggcagatctgattgtccaacgactcgccgatgccatcggactcataccattgccgcgagccgccggtcagcatgatgacccgcaccgtcttgtccgcgagcgcgccgggggtgccgtccggatgataggcgaacccacggcagatcacgcggtcgaacagtcccttgaccatcgccggcatcgtataccaatagatcgggaacaccagggcgattacatccgcctgagcgagccggcgctggataggcacgacgtcctcgggcatcggggcatggccgagataatgggcccggtcggccgcagaatacacgggattgaatccttcatcgtacaggtccagcacgtccgccgacgcgccgcgctcgacggcgcccgccgcgaatgccgcacccacggcatccgtcatgctgtccttttcggggttgctggtgatgacaagtatgttgttgctcatgattccattgtcccggaaagctggaccgacgacgcggcgagcgacgtcagatcaagtcgtacggcatctgtccgcggaccagccagaacacgcccatgaccaatatcaccgcgcccgcccacggcacgcgcccgcagaacaccacgcagcatatcgcggcgaaccgcgccgcatagaacgccacgcggcgagcgccgctcctcggcgtggtctcgcaggtcatatgcgtgtagctgccgccgagagtgcggccttgtctgaaccacggaatcacccattcgaacagcaccagcatgaccagcatcgcgatgtccccgaacccgagcgggccgagcagccgcatccgctgcacgtcggcgccaggacggcccgaaaccatcgtgaccagcaccatcgcggcgacgcccacaggggtcgcgcacaccacgaccagtcccatgtcgatgaggaatgccacgaaacgacgcacgaaccccggccgggtgaccgtctgcatatccgtgcgccgcggcgggaacagccggtcgaacagcatggcgcaaccgtatccgatcacggcgcccgacgtgttccatatcagatcgtccacgtcaaacagacgatacgagcagggaaacacacccatcacccccgtcagctgcatcgtctcgacaagcagcgacgcgagaaagccgaccggcagggcgaccgcgaatttccagcggaacacccgtttcatgatgaagccgagagggacgaagaacaccacgttcatcacgatctgcaggatcgccgtcagcccgtcggcgcggatatcaccgatgaactgcagcggattgagctgcggatgcagatggtgggtggcgcagtacgctgcgggatcgtccggcatcggatacagcgtgaagcacagcaggccgatcagatacagcaccgtcgcgtacgccgacagcgccgcaccgaagccgagccggttgtcccggtggtacagcatggccagcacgggcacggtcacgatgaacgacaccagcggccataacgccaccgacatcatgaacggcgccgaaaagctctcgaagaatcccatatcgtctgctcctcccctgttggtttcactgtagccgagtcgcaggccgccgggccatccgccatgagaccgatatggacgacgagcgcttcggccacgacggacggcattcatcctcaggaaggagaagagaaccgcagaaaagggaagcacgggaaacgcggcgagggcctgcggggcccgggcgggtgtcctcctcggccccggcgccccatattgtgacgaccggtcacccgaacacacggcgacggactacagtggggagtagctacataggcaggaggcgcaatggacattcttttcgtgaccagcgatccggcgttggcttccgcggtgaaaggcacgctggaatccgcccggcacacggtgtctgccgcgtcggatgtcgattcgctcgccggcgcatggccgcacggcacaccagtggatctggtcatcatcgacgacctgtccgcgcatgatctgttggatgagaccagacggagcctgtcccggctcatggacggcaaggccggcgacggcaccggcacggccgtgcgaccgcgcacgctgctgctttccactcccccgcgcacgccgaaggcgaacccggacgacacgccgcaggtcagacgacagaccccgttgccgacgatccgcaaaacaggccgggccaaggccgacgggcaggccgcccggccggccgcgcccccatcgtctctggacggcgcttccagcgtcccgcccattcacgcggatgaaacgatcgtcaagccgttctcggacgccgaactgctgtcttacgtgcacgcgctggaatccggcggagccgcggacgagaccacgctcatccacggcgacctcatgctcgacacgcgcaatcggcaggcgttctatcgcagcggcaagcagccgctggcgctgtctgcgcgcgaatacacgacactggagacgctgatccgggcgaacggcgaattcctcagcttcgacgagctgctggagaaggtctgcggcacgggcatcttcgagcagcgtgacatcatggacggcacgctctactcattgacgcgcaagatgcggcgcatgggattcttcatcacgcagcgggggcatcgttaccgcatccgctgacatcaagccgtcgccggccctccgtcgccgttccgctgccggccgcagccgacagcgttacacgaaagccggtatcgaaagaccagaaaggcgcggctcgggcatgcatcgcccgaaccgcgcctttctggtcacatgccggtcatcggttctcgccgacgaccggcacctgtcgacggtcagtccttgtcgatggtcttgcctgcggtggcgccggaggacaggtcctggatctcggtgatctcaagcaccgggatggcggcgggcttcttggtgcccttctcctcggcgaccttgacctgggcgtcatagatgtcgtcgtcggtgtgcagggtcacggtgccgcggaagcggtagcccttcttctcggccaggttagcgacggcgacgaccagcgggctgccgtcctgcaggttgcggtagtgctggccggcggtgcgctcgtggtaggcgaggtggttgtcgtcgagcacgaacatcgacatcttcgggccgagatcgaggttgccgtccttgtcgacggtggtgatccacgcgaggttgttttcgatgaacgtcttcatgtcggcggtgagcgttgccatagtgcacgatcctttcgtttggtgatggtcacactggttattccacatatcagcctacttcaaactcctgtggcctcatagcgaaatcagccgactgtgaataatctcacctgcgccgcgcggcgtctcagcccttccacgcacgcaacacggatttcggcacgcgagacgcgtcccagcggtagtggccggtgacgcccatgcggcgcgagaacgcaagataatcgttctcacgctgccgctgattcatattgtgcagcacgtaggagaacccgtcagcgtcccgcttgtcggagatcacgccgatatgcttgacacggtcgaacacgacgatgtcgccctgctgccattgcgcatgatcgttgacatcgttggtgagggtgatcccgtatttgccgaagaacacgtcgagcaccccggtacggcgaaagtcgatgttggggtcgggtttggcggccaccgacgcataggacgcgcggtccgcggcgatgtccgcatcgaccatggccttgaggtcgtatcccgcgttccggaaggcgcgccacaccacatcgacgcaggcgccgcggtcggcgggcgggtatccgccctggtagtagccgtcgtcgtatgccgggtgcgccagcgcatccttgcgggccccgcgcatgatgtccgtatagtcgtccacaccgttgccgttgaaatccaccgggctggtcaacacgggatacctgcgccgcgacacgtcgggcggcatcaccgtcgtgtcgggctctcgcgtgtgcgagtacatggacgatgccttcacgccgaacgccttcaccccgctgatgatgccgtcgcggcgcgaccatagccatgaacccgccaaaacggcggacacgatcaggagcgccaccatcgcggcggccaccgcgcggccaaccgcgcgactggccttgcggccatcatcgcgaccgtttccgccgcttccgcccgcggcattcccgttcgaaacacgatatcgccgaatcataatcgttccgccctccatagtcgtgcgtcccgcatatcccgcgcccggcgtcgcgggcggatggccgcgcgcggcccccggcccgggaatccgggcaaacgacggacgacacgatgcacgcaggcccgcgccgtggctaggatattggatggaatatgttgggtgaagccaccgtcctcatcgcggcccgtcatcgtcttcattatggacggcgtcgatcggcagcgcaagcctgtataaggagaatatgtatgaacatcgtcgaggcaatggagcggcgccacgcggtccgcgatttcagcgaccggcccatcgatgacgatacgcttcgcgcgctgaatgaggccgtggacgcggcgaacgccgacggcgggcttgacgtccagctggtgcaggacgacacggatgcgttcgggggatgcccgacccattatggtcgcttcaagaacgtccgctattgcatcgccctgatcggctccgacgacgaggacccggcacagctggaccgcaaggtcggctattacggcgagcgccttgccctgacggcgacgcagctggggatgggctcaagttgggtggtgttgcacgagacacacgaccatgacggacgctggcggctaggcgagggcgagcgcatgcccgccgccctggccttggggtatggcaacagaccgggccgggcacatcgcagcaagcctttggaagagctcggggccgtggagaacggcgacctctccggcgctccggattggttcctgtcggggcttcgcgcggtggcgctggctccgagcgcattgggcaagcagccggtgcgcttcaccctgctggaggacggcaagacggttctcgcgcagcctttggagggcgttcaggccgatatctgcctgggcatcgcacggtatcatttcgaggtcggctccggccatactgatatcgtcgtccgctgattcgaccgggccggcatggccgttctcccgaatcagtcgcacgattgtgcagattcagctataaccgtgtaatttttcagcatttttcgccgcaagataagtcaagttcgagaaggaaccgctagcgtcgttcaacatgaagaactttttcaagggaatttcgctgtcgtctatcgcggcaggcgcgttggcggcggtcacctcgttcctgttatcggcgaagatcggcatcgccggttcggtgatcggcgtggcgatcggttcgattgtgtcggcggtctcgtcacagatctatcagaacgtactacacgaatccggccggaaactgcaggatgtcgcggggacgacgggcgacggggacgacggcgctacggagacgacggctgatacggatacaaccgcttccaccgacgccaatgcgcaggaccatacagcgatcatcgccaatccggtggcgctgccggcccccgcatcacacgagctcggtcacggtccgcggaccgtcgcctcggacgccgcacggcggctgtcgcacggcgatgagacgcaactgatcggcaacgccccggtggacgccaatgcgacgattgcgagcgggatgccccccgtgccggcgccaccgtcctcggcccgcgccgccacgccaagcggcatgcgcacgtccgcccggcctgccgcagccagattcacggcctccaggtccgctaccttcaggtcagaggccgatcgggcgaagcgcaacaagcgcaccgccatcatcgtcgccgtcgtcagcgccctggtggcggtaggcgcgaccgccggcgtcatcctcgccatcacccaaggtcagggaaccgatactgtggtccgcgactgggtgcgccagtcgaacaccccgaccgagcccaagcagcaggcaccgcaggacgacacgaccgacggcaacagcgacaccaaggattcaacaacgaaggacggcaccgattcaaccggcaaggactcgaccggcgacagcaacagctcgaccaacagtggcaatggatcgaccgattccactcagggcaacggttctgactcctcctcgtcgaacgggtcttccagctccaacggatcaaatggctcgaacgggagcaacggctccgactccaccggaaccggcaacggaaactcctcaggctccgactcctccgggtcgggctcaggcagcaacggaaccggcaacggatcgggccactccggctccgacggagcaagctccaactccggttccaatggttccggttccgactccggctcctcgtcgagcgggtcgtcgtcgggatccggatcgggttcttcctccggtggcggctccaccggcaccggcaagtccggcaaccaggcgtgacatcaagcagcccactcgtatccggccgcttatcccgcggaagtcccaccagaacagccgcatatgggactttcgccggataagcggcccaccggccacgttccccacacccatatgtcgccccttatccgatgaaagtcccatttagccgtcctcagatgggactttgggcgggtgagacggatgacgcgggtgacggaggctgtacgacacgcccagtttggttttcataccgacttgaggtaaattatcaatcggctcaaaaagcagctgataaatgaatttggggctatggcgcagctggtagcgcatctccatggcatggagagggtcaggggttcgaatccccttagctccacagattgaaaccggtcgatttcgaccggttttttcgtttacgcacgctctccggcaggcaaccaaaagaaaacgctccgctttctcgctttcgaggggttgattccaccctcaaggaacatctatctgcatttcagggggttgccagattgcgatatccggagtattccggccggattgccattgaagtcatgcggttcctggaacttggatacttggccggcaaccccttgaaacgcagatagatgtttcagcgtcaccgaatcaaccccttgaaagcgagataggcatccattcaccgaggaatcggcggatgaccgtcagtcgccgtgctgcacgcgcatgagcaccgtgccgtccgagccgctgacgaccgcatgaggtgccgggtcgagcgacagctcgacatgcaaacgctctccgccatggccgaccgcatcataggcgtaccgcctgttgtcgaccgtcaccggcgtcgtcatggcgtgggtgagccacggattgcgccggcggatgccgatcagcccttggatcaggcgatacatccactcccccgtgccaggcaaatcatccggcgatgcggggaacgccggccgcaccgcgtcatcgccgcccatgcggtcctccttgacgccgcgaaacgcctgctcgtcgccgtaatagatgctcggcacgccgccgacggtgaacagcacggtcatcgcaagggaggctccggcatctcctacacgactggcaatgcgtgtcacgtcatggttgccgacgaacgtctgcggcgcgaacgactccagaaactcattgtgccgtttgaggctccaatccagttcatagaagttcgcggattcgagcgaactccaaatcgccttccacagctcgtactgggtgagtgaatccatgccggattgccggacaatcgcggggtaatcgccatgaatcacctcgcccatgatccacacgtcggggaattcgcgccgcacggcgggcagaacacgcgtccagaacgccggcgacacggcgtaggcggcgtccagccgccatgcggaggctccacgccgcagccaatgcagcatcacatcggtgacgagccgcacgacctcttccgagtcatgattgagttccggcagttcggggtgcccctcgaaccggcgatagtccactcccccgcccgcatttcgcgtgatgtggaacatcgactcgtggccgtggccggcgagcgcgtccctaaacgccgggaacgagcgcccaacatggttgaacacgccgtcgagcatcacgcggatgccccggctacggcatgcatcgatcagcctgtcgaatgcggcgtcatcgccgagccgagaatcgatgcgatagtagtcgaccgtgtcgtacccgtgggtctcggacgcgaacaccggccccagcagtaggccgttcgcgcccatgtcgatgagatagtcaagccacgggatgatggcgtcgagtcgtggcgtcaacgcccgctcgccctcgttggacgggcgtatcggggcgccggtgaatcccagcggatacacctgccaccagatggtcgtgtcgttgacgctcatgccatagccgctcatcgcattctcctcatccggcacacccgttcccgtttcccgtgaccgggtgtgccgcagcgatcatctggccgggaaatccgggtatccgtccccgtcgaggtcgggtccgtccgggccgccgtagtagccgtcgccggtgcccatgaactcgcgggtgctgacgcggttgacattgcgggcggcatccaccgcgtgctgcagttccttgcgcacggcgaaaccgtcgatgatgttcttcagcacgatcttgccgccggtggactggtccatcgcgtcgatgagaatcgtgctcaagccgaagatgcgctgcagcagcgtgcgcgagatcgtgatgtcgacgatgcggaacagcttgacggtgtcgaagctctgatgcagcagaccgctctgcgtggccagctcgtcggccgtcagagtgtacgtggtgaacgtgaacggggtgcggcaccagttgcgcttgcgctgcgtccagatgatgtcgccgtctgcgatgttcttggccatgatcggtctcctcctgctgtcgatgacggtatgctcccatcgtagcccgtcattcgggacgcaatgtgtcctctgccagcgtacagggaacggcggatagagggacggacggggagaacgcagcatcaggagcctgctatagggacggatgctcccactggtcggtgtcggcgagcgccggaccatgattgtagtcgacgagccgccatcgcaacgtgccgtcgggcatgtcggctgcgacgaaccgcacccagtgcgcgttgcccatgctgaccacgtcggcgaaatcggggtggatagcccccaatcccagcacggtctgcacggtctgcgcgatccatgagccatgcgagaacacgtacagatctgtgtcggctccggcgctgaacgaccattcctccaatgccgcgcggcctcgctcgccgacggcggccttcgtctcggcaccatgccgcagttcgccgccgcgatattccgcccatgcacggtagtcctcagggcattcgcgctccagttcggccagctccttgccttcccattcgccgaagttgcgctcccgcacgcgggcgtcggggtgcacgaccagtccgagcgggtcggcgaaggcgtgcgccgtggccatggcacgactcaggtcggatgccacgacgagctgccggcgttccgggtgcgattcgacgtatagggagcgcagtgcctgcgcggtctgcctgacctgccattcgccgatctcatccaaggggatgtcaatctgcccctggaagcaatgccgggcgttgtatgaggtgcgcccatgccgtatcagcgtgatggagcggacgtgctccggcatcgcctgcggcgaggagacatcactcatcagcttcgccggcatcgtcaccgtcactgccgttgtcggcggattcgtcgcccgtcgtctcggggtgttcgagaggcagctcgacgacggggcagtcacgccacagccgttcgaggcgatagtactctcgcgcgtcctgatgcatgatgtggatgatgaaatcgccgtagtccagcagcacccactgtccttcgctgacgccttcgcgcgagcgcggggacagatgcccgcacttgaggtacacgtccttctcgacctcttccgcgacgccgatcacctggcgctcgttcatggcggtggcgaccatcatgatgtcggtgatggcgagcaggtcgctgacatcgaacgcctcgatgtcggcggctttcatgcggtcggccgcgactgcggcgacgcgcacggcatcaatggaactctggactgctgtcattggatcaacgctcccaagcgggcttccagccctcgacgatgtgttgtgtgttttcggaatagaccatcgaatcgtccggcacggcgtggcggatgaccgaaccggcaccggtggtgacgccgtcgccgacctcaaccggcgcgacgaacaggttgccggcgccgacgtgcacgttcgagccgatatgcgtgcggttcttgtgcacgccgtcatagttggcggtgatcgtgccaccgccgatgttggtgtgctcgccgagttcggcgtcgcccacataactcagatgcggcaccttggtgccgttgccgatgtgtgccttcttcatctcgacgaacgcgccggccttggtctcctcgcccagctcgttgcccggccgcatgtaggtccacgggccgatgttcgcggcacgcccgatatgcgagccctgcacgcgggagcgttcgacgacggcctcggcgtccacggtcgcgtcgatcaacgttgtgtatgggcccacgaccgcgttctgaccgatcacggtgtggcctttgaggaacgatccgggcagtacggtcacgtcctgcgcgagttcgacatcgtcttcgatccacgtggtgtcggggtcaaggatcgtcacgccgttgagcatccagtgctcgcatacgcgacggttgtgcgccttcgacagcgcggcgagctgcaggcggtcgttcacgccttcgacgctcagcgggtcgggcgcggcgaacgccccgaccgtgccgcgcgtcttcgcggtctccagcgcgtcggtgagatagaactcgccctgcgcgttgtggttgtcgaggttcgcgatggcctcggcaagcagatcggcgtcgaacacgtacacggacgtgttcacctcctgcaccgcgagttcgctccggttggcgtccttctgctcgacgatgcgcagcacgtggccgtcacggtcgcggatgatgcggccgtatccggtcgggttgtcgaggatcgtggtcagcacggtggcgccgtcgccgctctgctcgtggaacgccacgagcttcttcaacgtgacggagtcgagcagtggcatgtcggacgcggcgatcagcaccgagccatgcaggttgcgttcctgggtcagctgcgccatcgcgcactggaccgcgcggccggtgccggggatgtcgtcctggttgacgatgtcgacgttcgcgtcgtaggaccgtgccgcctcggagacgcggtcggcctgatagtgcacgacgacggccagcgtctcgggctccagatgtccgactgatgccatgacacgctggaggaaggtcttgcccgcgaattcgtgcaggaccttcggcttggacgaacgcatgcgtgttccctcacctgcggcgaggatgattgcggcggatagtgccatttcggtgcgactccagttctctgccgactgcaggattgctgcccggccgcggattgccgcggaaccgggcgcgaaagttcccccacctggactcgaaccaagacaaagggttccaaagacccgtgtgctgccattacaccatgggggaatggcggtgaacccgccaagtttttattatgccatacctcgcgacttcgtcaaatcgaagctcatgcgaacaggaagccctgcccgtggtgctcggggtacgtgtcgaagagctccgcgacggaaccgtcctcgaacaccgcgcggatggcgctggcgagcagaggcgcgatcgacagcacggtcaggccgtcccagcgcttctcttcgggaatcggcaccgtgtcggtgagcacgatctcgctggcgccgcagttcttgagacggtccacggccggaccggacagcacgccgtgcgtggcgaccacggtcacggacttggcgcccgcgtcacgcagcacgtggcaggctccggcgatggtgccggcggtgtcgatcaggtcgtcgacgagcacgcagtccttgcccttgacatcgccgaccacacggttggcgaccgccttgttcgggcgcgtgatgtcacgcgtcttgtgcacgaaggcgagcgggccgccaccgaggcgttgcgcccactgctcggccacgcggatgcggccggcatccggggagacgaccgcgacgttgcccagctcgttggagaaccgatcgcggatatagtccaccagcaccggcatagcgatcaggtggtcgaccgggccgtcgaagaagccctgggactgcgcggcgtgcaggtcgacgctcatgatgcggtcggcaccggcggtcttgagcaggtcgaagatcagacggcaggagatgggctcgcgtccgcgatgcttcttgtcctgacgggagtagcccagcagcgggcataccgcggtgatggaacgcgcggaggcacgcttcaacgcatcgatcatgatgagctgttccattatcgacttgttgaccagatccgcgtgggtctgcagcacgaacacgtccgcgccgcgcaccgattcggtgtagcgcacgtacatctcgccgttggcgaaatcgtatgcggtggtctccagtatgtcgatgccaagctgttcggcgacgtccgaggcaagcttcggatgcgtacggccggtcacgaggatgaggtttttatcgggctttccttcgaggattgcactcaccatgtctccaaacgtttgtgtttcgctgaagtggacaatgtcatagtaaccgtgcacaccgaccgcatgtcacatgcaggccagccccggttcatgttccgttagcgttcccggcacgactcgccggcgtgtcccggtcagccggaacgcctgcggtacaggccgtgcttgccgatgtactgcacgacgccgtcagggacgaggtaccataccggctcgccgtgcgtcgcgcgccggcgcacatcggtggaggatatggccagcgccgggatctccagcgtgtccaccttgccgtcgggcagccgcaccccctgtggcgacgagtagccgggccgtgtgaccgctacgaaatgcgccagatcccacatctggtcggcgtccttccactccatgatctccgccaccgcgtcggcgccggtgatgaagaacagctcggcgtcgggatgctgcaagcgcaggtcgcgcagcgtatcgatggtgtaggtgacgcccggccggtcgatgtcgacgcgggacacggtgaatttcgggttcgacgcggtggcgatcaccgtcatcagataacggtcctcggcgttggtgacctgcttgtcgagcttgaagaccggccggccggtcggcacgaaaatcacctcgtcgaggtcatacacccaggccacctccgaggcggcgaccaggtggccgttgtggatcgggtcgaaggttccgcccataatgccgacgcgcgggcgcatgtgccagttgccgcgcgtggagaaccgcttggctccgtccggtttttcggatgacaggtccgacatgcggcgctccggctcgacgagatattggatttcgggcgaggggtcggcttctgcggccaatgggcttgcctcctgcggcggccttcgcgtcgtcatgcctccgagacctccggctggctgtccgcctcgtccgtctcgcgctcgccctggtccgcggtggtgttggcctcctgcgggtcgatcttgcccatgtcctcgtcccattcgtcctgcacgacgcggcggatctcggcgaacgtgggcagggggaagccgggctggtacagcctgcgcacttcggcgacgcgctcggtgatacggatcagcgtgtcggtcatgccgtcgacgtcgcccttgcgttccatggcgctgaagcggcggatgtactgctccatcatgcccatctgttcgcgcaccgtcttcagcttcaccgcgtccagttccacgacgtccggggagtcggtctccggccagccgatgagcacggcgtcggcgtattccagcgatgcccgctggctggccgaggcgatgccatcctcgatctgcaccaggaacacgtagcggacgatgctgagccgttccgcggcaatcttcaggcccaatgtctgatcgttgagatcgatatcgtcccggatggtggaaatcaccggtcgttcctcgctcatgctcgcacctgccccgttccgtagccgatccacttcgtggtggtcatctctttgagtcccatcgggccgcgggcgtgcatcttctgcgtggagatgccgagctccgcgccgaagccgaacacccctccgtcggtgaaacgggtggaggcgttgaccatgacgacggccgagtcgatgcgcttggcgaacgtttctatcgcggagtagtcctcggagatgatcgactcggtgtggccggtggaatgcatgttgatgctgtcaatggcctcgtcgagcgaatcgacgatcttgacccccatggtgagcgccagatattcggtgtcccaatcctggtccgtggcgtgcttcatggcgaggcttgggatgccggccgcctcgatgatggcgaacgcccgctcgtcggcgtgcagctcgacacccttgtcggcgagcgccttcgccgcggccggcaggaaccgttcggccacgtcacggtggaccagcagcttttcggcggcgttgcatacgccgacgcgctgcgtcttcgcgttgatgatgatggggatcgccttgtcgaggtcgccgctgcggtcgacatagatatggacgttgccggctccggtctcgatgaccggcactttggaattgcgtacgacggcctggatgagtccggctccgccgcgcgggatcagcacgtcgaggtggccgcgggcctccatcatcgtcgtggcgccctcgcgtccgtattcgtcgacggtgtcgatcagcgccgggtcgaatccgttcgcggcgagcatgtcgtggatcaccgccagtgtcgccgcgttcgtgcgctctgcgtcgtgccctccgcgcagtatggcggcattgccggatttgaggcacaggctggccacatccacggtcacgttcggccgggcctcgtagatcatgccgataacgccgatgggcacgtgcacctgattgagccgcagcccgttctccagcgtgtatccgcgctcgatctcgccgaccggatcgggcagcgaggccacgtggcgaacgccttcggcgctgacggcgatgcgcggctcgtcgaaccggagacggtcgagcttcccggcgtccatgccgcgagcggctgcggcctgcatgtcctgcccgttggcggcggcgatggtcgaggcgccggcgtccagcgcatcggcgatcgcgtgcagcagggcgtttttcacctgggtgtcggcctgcgccagatcagattgggcgcgtgcggcggcgtcggctttcgcgcagacgccggagaacacctcgccgttcaattcatctttcgtcataaagcccagaataacgcagattgcgagctttgcggggcattcgtgtcatcatgtcaatatgggggcacgtgtcctgcggccgcgacgcacgccggggtccatgccagtatgcggtacccgccgccgccatgcccacgcctgacggtagacttgagccgaacttcatcccattcagcagcaacgcaaggattaccagtgaccacgttccacagcacgcgcagcaccaccgactcacttacctccaagcaggccatccgcaagggcatcgccgacgacggcggcctgttcgtgaccgattccctgggcgagacgaaggtggacatcgcttccctgacgggcaagccgtatcagcagatcgccgccgaggtgctcggtgcgctgctgccggacttcaccgaggccgagctcgcgcagtgcatcgccgacgcttacggcgagcagtggtccgacaggcgcatcacgcccctgaagccgctcggcgacgactacatcctcgaactgttcaacggcccgacctccgcgttcaaggacgttgcgctgcagatcctcccccgtttcatggcgcacacgacgccggcggacggcgacaccgacgagaagatcatgatcctgaccgccacctccggcgacaccggcaaggccgcgctggccggattcgcagacgcgcccggcaccgcgatcaccgtcttctacccgcagggcaaggtgagccaggttcaggagctgcagatgagcacgcaggccggcgcgaacgtgaacgtgtgcgcggtcgagggcaacttcgacgacgcgcagtccgccgtcaagcgcatcttcggcgacaaggagctcgccgcgaagctcgccgccgactcgcacgtcgtgctctcctctgcgaactccatcaacgtgggccgtctcgtaccgcaggtcgtctactacttctccgcttacgcgcagctgctggagaaccaagtcatcaacgtgggcgacgaggtcgagttcgtcgttccgaccggcaacttcggcgacatcctcgccggctactacgcgaagatgctcggtctgccggtcaagcacctcgtggtcgcctccgacaagaacaacgtgctgttcgacttcctgaccaccggcacgtacaaccgtcagcgtccgttcttccagacgatcagcccgtcgatggacatcctcatctcctcgaacctggagcgcatgctgtactacatgtccgagggcgacacccgtctgatctccatgctgatgaatgacctcagccagtggggcacgtacgaggttccggagccgctgctcgcgaagatccgccagctgttcggctgcggctgggccgacgagaaccaggtgcgtgagatgatcgccgactgctggaagaagaaccgctacgtgatcgacccgcacacggcgtgcgcgtacttcgtggctcagcaaatgccgcgcgacccgttgaccccgcgcgtgatcctgtcgactgcgagcccctacaagttcccgcgcgtggtcaacgaggcactgggcctggatgccgacggcaccgatttcgaatgcatggatgtgctgtctcgcgagaccggcaccaccgctccggccgccctgcgtggacttgagaccgccgatgtacgtttcaaggacgtcgtgcccatcgacggcatggaggattacgtcgaaaaggccgcccaagcgctgtaacagctcagcccgccagcaggggcataaaggggcttacagctctttggcgcggtagaagcggatggccagagcggcggagatgcagtagacgcccacgcacagcacgacggcaatcagagcggcacgccaccatacgctcatgaaatccgcgacgccttgcagcaagccctgccaatcaaacggcaatctggacagcaacgcgacgagtgcatacagcccgactatgaccacaacgaatatccgcatcatcgcccggaacgtgaaccggtacgaaaacgccatcagaatcgatccgacgatcagggagaacgcgatgatgacggcgctcggtatcatggcaccggcccagccggaatccatcatgtcgccgaaggcgaagaagacgctgcatgccatcacgtccacggtccacatcgcgcaggtcaccagcagaaacaggaaccgtccggccacctgcgacgtacgggcgatgggaatcatcccgttcatggcccgatgaccgccgctctcctccgcaacattcacgctcaaggcggacatccacgacatcaccgcagccatgccgcatacgccgccgtagacgctgacggcgacctgtccgggtgcgccggtcacggtcagcaccagcgcggccacgcaggacagcacgggaaacagcaacatgaacagtatgttggacaacccgaacaaatccactcgcacgcaatcgaacctgcactgcctcactacggaactccagcgcatctcaccactcctttgccttgtacacgcgcacggcgatcgcatacgagaccgcatacgccgcggcggagaccgcgaccagcatcgcggacagccagaaacgatgcgagacgacggcgtccaccacgcccatcaccttggcgatcatcgatacggggaggactgacgggatgaacaccccgatcaacgtgacgacatagaacacccacaccgtgatctgcagtccgatgatcttgtcccacaaacaggaaacgggcatgatcaccgcaataatcagcacgatggccagaccgcccacgccggccacccacagattgcccgtgaatgaccaatcacggcggacaagcggctgcaccccatcgatcaatgcaatcaccacggccccgtacacggccagagccagtcccatcaagtaccgcgaggccatctggttccgccgcgatgcgggcgccaacccgcgcagccgatacccgctctgcatgtcgatgagcggcacggtcagcaccatcatggcgggcgagaacaccgccatgacgacgcccaaccggaaaccgaagccgtcgacgaacgccccgccgttgaacatgatcgaaaacaccggtgcgagcagcaccgaggcgaatgattgcatggcgccgtcgcccagcagatacgccaggtccagatgcaatgcggttgccagcccacgatttccccgccgtgcccgtacggcacgggatggcacggtctcagtcaacgttcccatggccgacctccttgagtgcagacgcggcctcgggcgaagacgcgacggaatcacggacgttggtcaggcggatgatatcgtcgatggaggccggctcgacgacgatatcggcgacggctgcgctgacggtgccgaggctgtcggagcgcaccagtgcatcgaaaccggtctggtatgtgtgcgagccaagcaccacgccggcaggcagctgggccaactcgcccggcccgcccttgactatacggaacgattcctcgaattcgtccttcggcccggtgtagtagagccttccaccagtgatgtaggtgatgaagtcggccgcacgttcgaggtcgacggtgatatgggtgctgaacagcaccgaatgctcgccgtcctcgatgtaggcatgcagcatgtccatgagttcgtcgcgggcgagcacgtcgagtccgctggtcggctcgtcgaggatgagcagtttggcgtcatggctcaacgcgatggcgagcatcagcttcatctgcatgcccctcgaaaggtccttgatcttcttcttgccgttctgagctcccccgagaccgaaatcgtccaggtaccgccgataccgctccccgttccatgccgggtagagcggggcgacgatgcgctcgaccttcgagaccttccactgttcgtacaggtagctggagtcgaacacgacgcccagccgttccttgacggcctcctcgtcaatgatgttgtcgaggccgagcacctggatgctgccgtggtcccgtcggatcatgttgaggatcagcttgatcagcgtggattttccggcgccgttcgggccgatcagccccatgatgtagcccttgggcaggtcgaaggtcacgtcgtccagcacgaagccggagtcgtagtgcttggtgacgccggtgaccgcaagggccatcgtgtcgggttcggatatggtggtcatggctatggtccttttttgggaaactctctcgtcccgtggcctcgcgtatcacagcgacgccacggtgttcgcaggttgccggccaatgccggcactcactgcttgcggtactcgtcttcgagcatgcggcccagttcactcagcgcgatgtcggcggctttggccgcgcgtatcgcctcggccaggttttcgcggacctgggtttcgagctgacgtcgcatcagctcgttgcccttgtccatcacgaaggtgcctttgccctggaggttctgcaccacgccctcatcggccagttcgttgtacgccctggtgacggtgagcacggagacgcgcagttccttggcgagtttgcgcagcgagggcaaggcctcccctgcctcaagctcgccgctcatcacggcgctgcgaatctggttcttgatttgctcgtagatgggttctccggacacggatgagatgatcagtttcatctatgcccctttccatgtgtctccagtatcacagccggattactgttctactgttacatataacagtagaacacttatggacaactgtcaaggtcgagagcataacagttgcgcgtcggttcacagactgcgcggcgcctcgctgaaatcaaacagcacgccgtcggcgagaccgcagatatccggccagtccccgtcagaagaatcatcatggatcgcccatacccgcatgccgacggacttggcggaccgcatcgccaccagcagatcctcgaacaccgtgcactgctccggcaccacgcccagacggccggcggccagaaggaacacgtcgggacggtccttgccgacattgttcgcatcgtcgacgctgacaatctggtcgaaatagtcgaaaatgccgacgtgcttcatcgccggctcgcgcaacgccggcggcagggacgtggcgacggccagcttcgcacccgaccgcttgagatacgacaggtattcgaccgcatgcggcttggcctccaccaccgtcgaataggcgacgcgcgccatgtcatcccactcctgcatcagcgcctcgggcgtgtcgggcaggccgaaccgggcgatcgtgtattcggcgatctgccggaactgcatcgccgccaccttgcccatgtagtcggcagggacctcgatgccccgtttggcgaggaaatcgatgtcgacctgatcccatacgcccatggaatccagcaacgttccgtcaagatcgaagattgccgccttgccgtggttgtcgtccatgatgttccttccgctattgccggttatccggtccgtatgtgtgcgctggccgtcccggctatgtcagcgacgatgatgccaacagctcgcgcgcgtggtcgagcgacgcctcggattcgctgccggacagcatccgggcgatctcatgggcgcgcgcgtcgccgcatacctcggcgaccgtggtcgtcaccgcggactgcccgccgtccgaggcgcccttggtcacgacgaactgcgcgtccgcccatgaggccacctgagccaggtgcgtgacaacgatgacctgcgaggttcgcgcgagacgggcgagacgccgtcccagctccactgcggccttgccgccgacaccggcgtcgacctcgtcgaagatgaacgtcatcggcccgccctcgcccgcgggagccgcactcgaacgccgatccgcggcggcgagctccaatgcgagcatcaggcggctcagctcaccgccggaagcgcttttgcccatcggcagctgcggggatccggggaacggcgtgaacaggaattcgatgtcatcgcggccgttcgcgtccagcggccatgtcgaggcctcgccggcggaatcggatacgggtatcgcctcttccccgcgatccgtgacgcggatatcgagccgcgccccggccatggccagcgacgacagctcgtcggtgacggtggcggccagcgactgcgccgcggcccgtcgcgcctcgctcagcgccccggcatcctgcagggcccggtcgaatgcggcttcgcgctcgtcctgcagctgggcgaccttctcaggagacgcgtccagatcctcgacctcgaacgtcgccttgtcgcgccatgcaatcacgtcctgcagcgtcggcccccagcgccgggtcagctcgcccagctcgtggatgcgcgcgttgatggcatccaggtcctcgacgctctcctcgccgtcaagctcacgcgacagcgagaacacgatgtccgacagatccgcgttcagggattccagacggtcagccaattcgccgaaatcaccgtcgacacggatgtcgcgcaatgaggagatcgcctgattcagcagatcagacgcgctcgatgaatcggcgtcgacatccacctgggaggcgtcaagcgccgcaagcgcccggctgacaccctgcgcgatatcggcggcgttctcgatgcgggcgcgacggcctttgagctcctcgtcctcgccgggctgggggtcggcgcggttgatgcgctggatggattcgcgcagatagtccgcacgctgtctggcggacgactcctgatggcgcagtcgttccagacggtcatcaagatcgcgcagagcatcccatgaatgacggtaccgcgccagcagatcatcatcgccggcgaccatgtcaaggaactcccgctgcctggatgcggcggcgatgcgcaactggtcggtctgcccgtgaatcgtcaccaactgcgacgccagtgattccaagaccgagcggggggcgctcttgccgttcagcacggcacgggaccggcccgacaccggcaccgtgcgcgacaagtacaactccccgtcctccagcacggccccggcatcgcgggcctcctgcgccacgccgccgcggtcatccacggcgaacacgccttgcgcccacgcctccgaagcgcccggggacacgcgcccgctgctggccggtccgccggaaatcagccggatggcactcaacagcatggacttgcccgctccggtctcgccggtgatcgcggtcattcccccggccggcgtgagcagggcacgatgaatcgggccgaggtcatgaatttccagctcctcaagcatggtcgaccccctgctcgccggaagaaggcaccgcggccgtgtccgccgcaccccttgcacgcgtgcgctgcgccgaggaaccaccgttcctcgcgtgctcgcgccatccgaccaccggcagatcgaatttggtgaccagacggtttgtgaacggcacaccggacagccgggccagccgcaacgtgctcttcgactcgcgcacctcgacgcgggttcccttcggcagggcgcactgccgtcgtccgtcgcaacagatccagccttcggatgacgaatcgtcgaggatgtccagagtgaacgtcgagccggcgccgatgatcagcgggcgggcgaacagagcatgcgccgccagcggcaccagctgcagcgccttgacgttcggccacatgatcggccctcccgcggagaacgcgtatgcggtggatccggtcggcgtcgacacgatgacgccgtcacagccgaacgaactcatctccacatcgtccacccggaccgacagctcgaccatcttgccacggtcggcgcgctccaaggtgatgtcgttcagcgcccagtcctgcagcggctcatgcgcacccggcagccacacatctacatgggcgatcatgcgctcgtcaatcgaatagtcatggtcggcgacgcgccggatcgcctcgctcatctggaaactctcgaattcggccagaaaaccgacatgacccatgttcacgccgagaatcggcacctgcgtgcaatgcaccagttcagcggcccgcagtatcgtgccatcgccgccaagcaccacgacgatctcggtgtcctcgtcgaccttgtgggtcacgccgccgaactgcggcgcctcgacgttgtcgatgatcgacacctcgaacccgacgttgcgcagccggtcgaccgcctcagacaccaccgtgccgctttcacgcagacgcgaatgcgtcaccaccactgcatgccgagcgcagaccatcgcacacctcatcatcatccgaaacgaccacgtactgtcatccacaatatcccataaggcgccacgaaccgtttatccgccgaaaacgaaacgcaagcgccgccggcggcgcgtccatgaagaccgatccggggccgggcgggcccgcgcccgcgatgcggacgacggcggcatcagcgccaaagaatactaaaatggcgagtgcaaccagtctgttgccgcgcttgacgcgcgccgacgcatacgaaggagcggggaccatgtcaaatctcgtttttgacgagtcctcagcgaaccgcgaggcatcgcacggctacgcgtggtggttctccggcgacacgttcgagaaggccgccgccgaggagcgcacccgcaggaaacgcagcttcattcaccatctcacctcgcatcccggccgtctgaccatcatctacttcctgctgctggtggctctgtccaccagtctgttgctactgccggtctcctcacacgaagaggagccgaccagcttctccaccgcgttcttcaccgccgtgtccgcactgtcgacatgcggcatctccatcgtgaacgcgaccacgcactggaccgcgttcggccaggtggcgctgctggtgtcggtgcagatgggcggcttgggcgtcatgacgttcgcatcgctgatcgccctggccgccaaccatcacatgaaagccacgcagaggctgctcaccgccaacgagctcggcaccacgaaactcaacgagatccgcggcgtgctcaccgtggtcatcaccaccacgttcatcatcgagtccgtcacgttcctcgccctgttccccggcctgtacggcatcaacaggggcaatgtccgccataccgcccgggaggcgctgttcttcgcggtcatgtcatacaacaacgccggcttcacgccggacggcgccggcctgcacgtcaacaactgggcggtcggcatgccgatcatggccagcgcgttctgcggcacgctgggatttcccgtgctgctcaacctcatgcgctgcgcccgccaccgcactcccccacgccgttggagcctgcacaccaagatcaccttggtgacgacgttctcactggtgctgctgtcgctggcgtggttcctgctggtggaatgggacaacccattcctgttcaagggcgccgacgtggagacgcggctgcgttacggggtcgtcgcggcggtaatgccgcgcagctccggcttcgacctgagctgggtgccgcaggtgagcgagccgacgaaggtgttcatgagcgtcatcatgttcatcggcggcggcagcacctccacggccggcggcatccgcgtcacgacgttcgcggtcatcctactgatctgccgtgccgcgttcaccggacacaccgacatcaacgccttccggcgccggattccgacgcgcgtggcgatgaccgcggtgagcatcaccgccgcctgcctgttcctagtgctgagcgcttcgctggcgttgatgctcgcctcggactgctcgctcaccgatgccctgttcgacgcctgttcgtcgttcgggctcggcggctattcggtcggcgtggcgcgcgaggacaatccggcggcgttgttcatcctcgccacggcgatggtggtgggtcgtctcggtccgatgacgatcgcatacgcgatcaacaggccccgcgccttggaatcgatacgataccccaacgagcccatcgtggtcggctgagggcgccgccgataccgtctgcatccgacggatgccgccgactccgcctttgtcggacggccagggatggccatatcatgacgtagaagcggtaccgttcaccgccgcccggagaatcggcggcgtccatgacggcggcaccggcgcatcgccgcgcacggcggcggaaaggatgatggcatggcacgcaacaacaggagcattctggtcgtcggactgggacgattcggcagttcggtggcgaccacgttggattccatggggcaggacgtgctcgccgtcgacaaggatcccgaactggtcaacaggtggtccgcgcaggttcccaccgttcaggccgacatgaccgacgtgctcgccgtcgagcagctcaacgcgtccgatttcgacaccgccgtcgtcgccatcggagacagcgtcgaggcgtcggtgatcaccgccggaaacctgctggacgccggcatcagcgacatctgggcgaaatcggtgtcgaaggagcacgcgcgcatcctgcagcgcatcggagcgcgtcacatcatcaacgccgaaacggatgcaggcaagcgcgtcgggcatctggtgtccggaaactatctggattacatcgagatcgagggctcgcacaccgtcgtcaagatccacacgccttcgcacgtggtcggctattccatcgcggacgcgaaggtcaacgaacgctacggcgtcaccgtcgtcggcatcaaggcgcccggcagcgagttccagtacggttccaaggaactggtcatgcaccgcaacgacgaactcgtcatcatgggcaagcaggacaacatcgacaagttcattcgcggctgaccgacgccaggcatcccctccatacccccgtatgaccacatactgaacgcaggcacgtgccgcagcgccatccaattggtacagtcaaaaagatgttgcggcacagtcgtcgcaacgtaacgacatggcggcggcgagggtggcgcaatgggcaatatcacgatggttgacgggcatgtgcccgacggctcgtatcaaaacgtgacgacgaatggaagctgctcctgcgatgccggcatgcgattcgacggtttgcgtgcccgcggctcgttcgatgcgatggggctcgacggcgggaacgtgcattgcgaggggcgtctgacctgccgcggcgacatgcatgtcaacagaatcagcgggcatggcgaactgcatgtcggaggcgacctgcgttgctccgctctggatttcaccggcaagatcatcgtgcagggcgatgtcatgtgccctggcggcatgaccgttcgcggactgctgcgcaaccgttcatgcatcgtcacgagatacctggatatgcagggcacgttggacgcggacgagctgcgcaccgaacggctgcggatgactcccctgtcaagcgccatgttcgggcgcagcggcatgacggaattcacccggacgagcaacgccgaacgaatcatcggcggcgatttgcgtgtcagcaggctcatctgcaccctgatgcagggcgtcttcatacggttgactgacgaatcgcatgtggaacgcgcctcgtgcatcacgaagctcgccatggacagcacgtccagcgtattgctggtatccggcgccgccaagcgtgtgtatctgcgcaatacgtgacacggacgacgaatccgcgcgcgatgcggcgtttttcagtcggcctttgcggcgatgtcatccatgcgggcgaacagcaggaactccgtgttcccgtgggtgccctcgatcggtgacggggcggttcccgcaaccgtcaacccatgctggttcgcgcaatcgacgaccgtctccagcgcctgatcgcgcagatgccggtcctccacgataccgcccttgccgagattgcccttgcccacttcgaactgcggtttgacgagcagcaccactgaggctccgggcgcggcgatgcgcgcaatgaccgggataacgtatgtcagggagatgaaggacacgtccgacacgatcatgtccggccgatacggcagattcgcggcggtcacgtcgcggatgttgacgccgctcatctcgatgatgcgcgggtcgcgcgcgatacgactatcgagctgaccatgccccacatccagggcgatgacctgagcggctcccctgcgcagcagcacgtcgcagaagccgccggtcgaggcgccgatgtccaggcagcgcaggccgcgcggcgaaggcaggcctcgaccggagaactcgtcgaaggcgccgatcagcttgtacgcgccgcgagacacgtagtcgtcgcccttgtcgacggtgatcgaggacgcggtggccacgttcgcggccggtttggtgacggcgacaccgtcgaccagcacatggccgtcacggatcagccgctgtgccttggagcggctcggcaccaatcccagaccgacgatgagcacgtcaagacgttccattcctgcacctttcacatccggtggtttccctgccagcggccttgtctttcagtggttctcgtcgagctcgcgctgcagctggccgagcacgtcgcggaagacctcgatgcgctggtcgtcgtctttgccgtcaaggtcggcgagctgtgggtaacgttcggtgatatcgtccggcatggccgctccttacgcccagtgtttcatgtgcccctgcacgtcacggaaaacgccgccggccttgcggcgggcggcgatgatcacagtgagaattccggcaatgagaccgaaccgatgtccccgccgttgtcggcgtacgtccatgcagcggcgcaggccgcgcgcagggcgttgatgtcggtcgcgtcgctcaccgtcagtgagccgtcttccagccgggcggtcgcgtcggcgcacgtccagacgttgccgtcgctcgcatcggtggatggctgggcctcctgcagtccgcgcaggtcgcggacgatataggacgggcgcagatgcgccggcgccgtcatcagctcatgcgggttggtgacgccggtcagcaccgcgagggaatcgtatccgccgcggttgccggcctcgatgtctgtatcgagacggtcgcctatcgccaggcacgattcacgactgaccggctccgtctcgtttcccgcggccagcagtcgggcctcgtcgtacatggcagactcgggcttgcccgcggatgcgataggctcgacgccggtcgcgttgatgaccgcctggatcatggaaccgcatcccggcgcgatgccgagctcgcggggaatggtcaggtcgcggttggtgacgagatacagcgcgccccgctccaccgcgtacgagacctccgccatctgctgccacgtcatgtccggataccatccctgaatgaccgcctccggggtgtcctcggcatggtctaccacggtgagtccctgaccggccacttcctcgcgcagatgctcggcacccagcacgaggatgcgcgctccgaccggaacgtgccgagccaccatgcgggcggccaccacggacgaggtgatgacctgccgcggttcgacgtcaaggccgaagcctcgaagctgctcggcaacgacgcgctggaaacgggaggagttgttggtggtgtattccacctgcattcccgcacgctgcgccgccctgatggaatcggcggcgtgttccaccgggttcttgccccggtagacgacgccgtccagatcgagcagcgccagccggtacgtctgagatatgggacggtcggtggatttgagcatggcgttcatgcgcgtcactcgtcctgcgcttccacagccggttcggcggcatccaaagcttccgcttcgtccgtctgcgcatcgtcggcttcggcgggttccgcgtcctcggcttcatcagcggcttcgccggtgtcatcggcgttctggtcggcggggtcggtgaaggattcggcgccttcttcggtctccttggccgtcagctcctcctcgtcggccagcgggccgtcaagggacgcctcgtcttcggcatcggggttctggccggcttcggcatcggctgagtcatcggagtcatccgattcggcatcgtccgactcgtcgccgtatccgtcttcggagccgccgtacatgtcgtcgtagtcgtcgggcgcgaactgggcgtcgtcctcgctgatgccgagcatgtcgagctcgtcatcggtgaagtgctccatgtcgtgatcgataatcacgtcgtccacggtctcgtcctcatcggcttcggcgtactgggtttcgagacggtcgagcaggtcgtccaatgcggcggcctgctcggtacggccgcactcgtcgaggaagtactgctcggcctgcacggcacgcatgcggtattcgcccggcagccctttggaacgtccgagcgtgtggacgatctcgatggccttgtcccacatcttgaggtcggcgagggcaccggcatagaccaggaacatctcggccttcgcctcgccatgcaacgccttggcatcgtcggagcgcaccacttcgatggccttcttgggatcgccgttgccgcgttcgcagtcggcgatgaacggcaggtagtcgaggaagccgttcatgcggtacgcggtgcggaactcacgcagggcgagcttgtaatcgccctgacggtacgcgatgaaggcaagtgtctcacgggagaaatcgatgcgcgacgcctgatgagcaacccacttggcgtgggcgagggccagttcgggatccttctcctccagcgcataggcggcgaggatgtgcaggccgatgttctcggcgtgctccttggacaggccgcgcaggcgttcacgctcttccttggacagcatggaccattccatgcccttgggcatcttcggctcgttcggacgacgatccgtataggggttctgcgaagggtagcttaccgtgccgtcggaattgcgacggggaccgttcatatagtcctgacgcttctgctcccgatattcgcgcttctcctcggcggagaactcgcgacgctcgccgtcgcggcggtcatcgcgctgatagcgcgggcgatcgccatcacgatggaagtcgcggcggtcatcgcgacggtaacgcgggttgtcgccgccacgacggtcatcgcgacggaaaccgccacgatcaccatccttgcggtaaccacccttgtggaagtcacggcgctccccatccttgtggaaaccgccatcccggcggaacccgccctgatcaccgtcacgacgcggaccacgatggaaatcacgacgatcaccatcgcgacggtcgtcacgacggaaaccgccgcgctcaccatcacgacggaacggacggtcaccatcacgacggtcatcgcgacggaaaccaccacgatcaccatccttgcggaaaccacccttgtggaagtcacggcgctccccatccttgcggaaaccaccatcccggcggaacccgccctgatcaccgtcacgacgcggaccacgatggaaatcacgacggtcaccatcacgacggtcgtcacgacggaaaccaccacgatcaccatcacgacggaacggacggtcaccatcacgacggtcatcgcgacggaaaccaccacgatcaccatccttgcggaaaccacccttgtggaagtcacggcgctccccatccttgcggaaaccgcccttgccgcggtatccgccatgctcgccgtcgcgacggaatccgccgcggtcgccgtccttgcggtaaccgcccgacttgcggtaaccgccggaacgtccggagccgtaaccgcggttgccgtatgatttgccgccggagcgaccctgttcttctgccatacgtgtatgcctttcttaatgcaaagtctgttgttgcgatgcgatgtcacgatgagcgggatggtctccgtgccggcgcaaccaccccagccggccctggccggcagctccccgccaaggggagcaggaacgaatcagtgcttctcgacgacgccgagcgccttcttgccgcggcggatgagcgcgaaacgaccgtgcaggaaatcgtcctggcccaacgtctgctcttcgtcggtcacacggttgttgttcagatacacgccaccggacttgatggtcttgcgggcctcggaaatagacttgaacaggcctgccttcaccccggcctcggtgatgcggtcgtcgatgccgacggacgcgaacgtcttggcaccggactcgtcctctatcttgagtccgtcgatggcggcttcaagcgtgtcctcgtcgatggaggcaaggtcgccgccacgcccgaacagggctgcggacgcgtcgatcgccgcctgcgtcgcggcctcgccatgcacgaagctggtcacttcccatgcgagggtgcgctgggcttcgcgtgcgccgggattggtgcgcgattcttcggcgagtcgttcgatctcggcctttggcaggaacgtgaacgccttgagcaggccttccatctcgacgtcggggcggttgaaccagaactggtagaaccggtacgggctgagcatggtggcatcgagccacaccgcgttgccttcggatttgccgaatttcttgccggtggcatcggtgatgatcgggctggtgaacacgttcaccgtggcgccgcgcaccttgcgaatcaggtccatgccggaggtcaggttgccccactggtcggatccgccgatttccagcgtgcagccgtactcgtcgaacaggtgaaggaagtcgttgccctgcagcacctggtagctgaattccgtgaaggagatgccctcctcggagttcagacgacgcgcgaccgtgtccttggccagcatggtgccgagtcggaagttcttgccgacgtcgcgcaggaagtcgatgacggacatctgcgcggtccagtcgtaattggagacgaaacgcaccggattgtcgccgtaggtttccagaatgccgccgatctgccgcttgagccgttcggcccagccggcgacgacgtccttcgggttgagggtgcgctcgcccgactggcgggggtcgccaatcagaccggtcgcgccgccgaccaaggcgatcggatgatgcccggcggcctgaaggtgacgcatgttgatcagctgcacgagattgccgatatgcagcgacgccgcggtcgggtcgaagccgcaataataggtgaccggctccccgttcaacgcttcggcgagttgtttcctgtcggtggactgggaaatcaacccgcgccattccagttcttcaaggacggaatcgaatccggcctctttgaaatcggtgacgtgagccatggatattggtactccctatcaaattctgggcattgtgcatctatcagtctcgcagaacatatcgacagcatgcgccaggacggctgcccgcgaaacgtcggggaatgctccccgatacgccgcttgaatccggccgtcagtgacggtacaggctttcgagaatccggcgcagctgctccagcacatcgttgttgcgttcggtgcgcagtttcgggaacgaggcgatcattcgacgctgctgacggttgaagatggacatcgccgcgtccctgacccgcatcatgaagtcgaacgacatctccttgccggatttccacgattcgctcatcttgccggtgacatcgctgacggcgaccttcatggcgtctccgtaatgcgtcatggcggccatgagattgtcgagactgttctcgaaatgcatgatgccgcacaccgtgacgacgaggtcgatcagcgtgagcacgaacagcaccccgcacagccagtggatggcgggcagcggcagccggtcggtgacacctgcaacctgcggctggatcaccgacgtgatgagcacgccgcccacgccgaacacgaacgcccccagcaggcagatgcgcccgttaagattgaatttatagtcggagtagtcccaccagcgggcatgaaacagcgcctccatgacccaagatgtgacgtattccagtatgctggcaccgaccatcgaaagcaggaacaccaccaggggattgtgcacctgtcccagcaccacgacggcgccgaccgcgcccgcaccgtaaatcgggcacaacgggccgttgaggaatccgcggttgactggccggcgctccaggatggacacgagaatggactcgtacacccatccgcagaagctgtagaacaggaaccacaggaacagtttttccacgaacagcatcaggccagcacctcccggctccgtgagggcttgtgccgcccgtcgtgcgcggacgctgcggatgctccgctttcgattgcggcaaggggtttaccggactccagttgcggcttggagaaccgctccagggagaaggtctcccgtgtggcactgatcttgtcggccatggtgaccagatagccttcgatgtagctcggcggcttgagcgtcatggggaacatgtggcatgcgatgctgtcacgttcgatcgcgttgaggcggaagtcacgcaccgcgttgcgcagtgcagcctgcccgtgcgtgaacccgtgcagcctatgggcgccgtcatcccagtcatgccagtcatacaggaagtaatcgtgcagcagagccgcgcggaccagcgaatgcagatcgaccttgtcccacagatgcaggcggtcggccatccacacggcgaggcacgccacgcggatagaatgcgcgaatgtcgtcaccgctccatgctggtagcatccgcgctcgatatgctgcatatgatcatggacgatgatgtcgtgcccatgctcgttgaccaacgaccgaatctgattgcgcgtcagcacactgtttcccttcgcccgaatccgtcttccgtatgtctgtgtctcttccagtcatgattctaggtcaggctcctgtcacgcgggttcatccttcaggatgagcccgcgcgcgctggcggggatgtggaggcggtcagtcggtgacggagcgcagggacttcggggacttgtaggccggaccatcgctcacggagttggcgaacacgcgcagcgcgtcgacggtggccttggcgcaggcgatctgctcacgtacacgggccggcgacgtgccgcccttgccgttgcgggcggacacggagccttcggtggacagcacctcgcgcacctgcggggccttgtcggcgggcaggaagtcacggaagatcccgatgaaatcgtcatccgtgagatcccacagctcctggccgcggccttcggcgagcttgacgcatgcaccggaaagctcatgcgcgtggcggaacggcacaccattcttgacgagccattcggcgatgtccgtggcgagcgcgaatccggtcggcgcttcggctgcaagacggtcgtggtcgaagctcatggtggcgatcataccggtgaaggcgggcagcagcacctccagcgtatcgacctggtcgaagaccgcctccttgtcttcctgcaggtcgcgggcgtacgcggtgggcaggcccttgagcgtggcgagcaggcctgtcaggtcgccgatgagacggccggacttgccgcgggcgagctcggcgatgtcggggttcttcttctgcggcatgatcgaggagccggtggagtaggcgtcatcgagacgcacgaacgcgaattcctgggtgttccagatgatgatctcctcgctcagacgcgagatgtcgacgccggccatggcggcgacgaacgcgaattcggccaccaggtcgcgcgaggcggtgccgtcgatggagttctcggtgaccttgccgaaaccgagttctcgggcgaccgcgaccggctccagtccgagcgtgttgccggcgagcgccccggagccgtacgggctggcgtcgatgcgcttgtcccaatccacgagtcgctgcacgtcacgcagcagcggccacacgtgtgccatgagctgatgcgcgagcagcacgggctgggcgtgctgcatgtgggtgcggcccggcatgacggtgccgccggccttgaccgactggtcgatcagcgcggatgcgagggaaagcagctgacctgcgatgacgcgggagtggcggcgcagccacatgcggatcaggcaggcgatctgatcgttgcgggaacggccggcgcgcagtttgccgccgagctcgtcgcctgcgatctccagcaggccgcgctccagcgcggtggcctcgtcctcgtcgtcttcgatgggcgcaaacgcaccggagtcgacgcggcgctgcagctcgtcaagcgaggcttccatgcggctgagctcatcggcggtcagcaggcctgcgcggccgagggcgcgcgcgtgggcgcgggaaccggcgatgtcgtcatcggcgagtcgccagtcgaactgcgtggatttcgacagacgggccagctcgggcgacggtccggaagtgaagcggccgccccacagggcgaggtattcggtgttttcagccatgcgatactccttggagaatgggcatattcgtgcggtttcgactgtctgccagactatcagcgttgtgatacattcccgtggcggctctccggtcgagcggccagacatacacaagcaccagcaggaatggcaccgtacagcgttacaaaaccgtcagagggcgaatcgccagtgcgagatctcctcgtcgatgtcgaacccgccttcgagcacgaactgtttcaacagtttcgacgcctgtactttcactttgaaattcggcagcgtcagattcatgcatcgctcgaagaacgatttcgcccgtggcacgtcgatggtgtcacgcagggcgtcgaatcggccgaatgcgttcagacttttctcattgatatatctgacggtgagttcttcaagcaacgacctgtcgacgccgagatgatccacgagcttgtcgatctgctcatctttctctcgtttggcatagcgcgtgatgtagtcccgcagcgtcatgccttcctcgacttccacatcgccacgctccacatcatgcaggaacagctcagcaagtcgttgttcgtccctcgaaagcgcagcgaaggatcggtgcagctgtgcggacatctccgccaactccggactgtcctccttgagtgccttgagccatttgacgaagttggcattcatgtagtcggtgtcgatcagtccggtgtcgatttcggtgagatacccttccagctcataaggcgcttcggggtcacatctcccgtcatcgtccggttctccggtgcagctgtcatcatcgaacagctccttataccgctgggcgagaatcagatatgtgcgttcgtcaatttggggacgcacgatatcaggttcgccgttcccgccatcgttctcatccgcatcgtcggcatccgtgccatcgaccttgtattccgtggtgttccagtcgaaaccctgcactttcgccgcttcaaggtaacgattcagctctacgaactccttggcgaacttgcgtctggcctccaccgattccggcagctgcatgaggtccgattccccgttatccgtgaacacgtcgagaatctccaagtaccgtgtatccatggatttcacgttcgcgggcagtttctgcacgaacaaatcaagcggcctgtcgccggagtacagtttcaccgccgcttcgatgaagccgtacatggtgtgcggcttgcggtagtagcggatgactccgaacggcttgtccggcccgaacaggcggttcgtgcggctgaacgcctgaatgatgctttcgtagtcgataatcttgtcgagatacagcgtattcacccattttgagtcaaatccggtgagcatctggtccacgacaatgagcaaatcgagctgctgactgcggtttgctgctatgccgccgtacggactcttatgcgatagtcgcgacgaaatatctttcttcatcgccggccatgtggggatgatgaactctttgccgaacgcctcgttgtaatcggtgatgatttcagtcagcgcatcttctttatccgttgctccttcgttgttgtcgatgttgggatcgaacaacgccgttacatgcaacttaggtgcttgctgcttgaacaagtgataatagttgacagcttcaggaatggagctagtggcgagcatcgcatggaatttgcccgcatggctgagcaccgggaactgttcgagaatgtccgagaccaccatgttcggatgcggtgagtcgatgccatattggtctcgtccaaggaaatcctcgatgccactgagacggtttccagcgccatcaaccatcggccccatagggacctcggatttatccatgtaatgctgaaacaccttagctttaatggggtcagcaagtgcatcttccgtactctcagctttcgccttgtcgagagccacggcacgtctgacttcagaatccttgtacgtggtcaccatgtacggatcgaatccgagtacattatggtcacgaatgccgtcggcgatgctgtaccggtgcaggcaacggccgaataccatggcggtggtggagttcttcttctggttttcgcccagaatgggtgtgcctgtgaatccgaagaacagcgcgttggggaaggaacggcggatgacttgcaacatgtcgccgaaggtggagcgatggcattcgtccacgatgaagacgatgcgtcgtgcagcaagttgatccagccatgtctgggtgacgccccgctcccctgctttcacgttgctcatcttctggatagaggtgacgatcagggtgtcgttgacatcggtgctgttgagtttgtcccgcaaaacaccggtgttctccgtgccctgcacttccgtctcgctgtcggcaaagctgcggtactccttcaatgattgagtgcccagttcgattcggtccatgaggaacacgaccttgtcggcgtcatgcgagtcagcaatgagctgagccgatttgaagctggtcatggtcttgcctgaaccggtggtgtgccacacatagccgccgggtcgtcccggcatggagggtcgctgttcccaatcacatttcctcaccacatcggagatggcgtttgccgcgatgtactggtagctgcgcagcaccttaaggcatccatccgccgagtcggcgatggtgtagaagccgatgagctggtgcgccatgggaatggacagcaggccggcggtgccggaagtgccgccgatgaacagcttccattcgtctttgcctgggtgttgcccgccacagataggctcgttgttgtagtccgcccaatggaagtaatagcttggattgaatttgtccgcgccgggattggcgaagtagacggcgtcgtcgggggtcatggccacgaagatctgcacgagacggaacaggccggtgaacacgccttcgtgcgcgtatttttcgatctgattggtcgcttggctgacgggtatgccgcttctcttgagctcgatatggatcaatggcatgccattgatgaggagcacgaggtcgccgcgccgcgagttcagcatcgtgttcttggctggatagaccggttgctgaacgatttggtaggtgcttttgccgcccgcgatctccttgcggtcatagatgtagagactgacttccttgccgaaatgcgccacatcttctttgttgtcacgcgtgatagacacggtacgcccgttgacgaacgaattgagcgcgagcggcgttcgcagggtctcgatctgctcgattatctgtgccatttccccgtccgtcagcgggtatttgccgagcctgtctatgtcgttgttgttgcggtacagtatgtctttccaattgtcgagcaaatctcgctcagttggatagcgcaggacaccgtccttccatccatgctgcttaagcacggtgatgacgttttcctcgaacaccgattcgctatcgaatatcatgattcttctctccccgaacttcccagtgtcctgcctttcgcgagccgacgcgcttaagcaatccacacccaatgagtatcttcagcatcccttcgcacagtcgctgatgagactcccacagcacgcgccatatcatcgtatgtcgcgctggggctcttctctacaaaatgaagaatgactcgctgtctctcggttatctgctcattcaaaccatttaactgctcattattgtcagttatctgctcattcgaactatttatctgctcataatcgtcagatatctgctcattgttatcaggcttggcatccgcctccaacatgagcgtgagtatcgtgcgatcagcttctccgaagttctcttcaatctgtggttcaggaagtcctgcattcgcccatgtggcgaacacatcggggacacccgtaccagctcgctcgcccacatcgattaggctgaacatcttcatgacaagaccgttgcgcggatcagacaccccgccgaggcgcatctgttcaatgccggttcgaatatcacccggattctcgaacaccaacttgtcgggggtgcgcctgaccaccactccgcgtacgccatggtaatcggcgttgaacaagcagttggccaacgcctcacggaccgccttatgcatgggggtgtcatcgacgcggaaaatgccgtcgagcttgaacggggtcttcagggattcggcaagcttgcggttcacgcggaaaaagaaatcaaagaggttgcctgaccacatgccatctcccgaatgcacacgatcggtccagcgaatcgccgggtccagagtctcctgatagtcaagataatactgcgggcattcgcgcacgatgtcatagtcgttgccgaacatgagcaggccgccgaacgtgggatgcagcctgccatcctcacggcttaccgccgccgcgccaatggcgcgtagaaaacgctcgtcatcgagatcggtccaggagctgccctgtcgcgctgcgcggaaacgattgcgatatgcccgcactgtgtctgtattgaagtcggcaacagtgagatcgtccagcaccttggaatccatcgtctcagctccctgatcccggagcattgctgagatctcctgccgcgtgcaacggtagtcgccctcaccacgccgacggtaggttcccccgaagagatcattattgatatacacggggcgttcgtcacgcggagcgcgcggaacgtgaatagccagcactatcccaccatccgcttcgagcacttcaacttccgattcgatgggcagcacggcgctcaccttgaaccggttgctgaccgtgttccaaaagtcctggcgaagatgttccgcttccactggtgtgagcccgactgtttcaaatgtgccgtcttcgcgttctttgacaccaagcaggatgacaccgccataggtgttggcgaaggcggagtaggtctcccatatgctgcgcgggaggccgcccttcgcggacttcgcctcgatccggttattctcgcgatatgaggcgagcttcgcgatatcgaatggttccatggcgattcctcccctcacacgaacatcttgtcaagcaaggattttttgatgttccgcagcaattccaacttacgctgatgaagggtgatgaggttatcaaggtgggagaagaatgagccgataacctgctgctctttctgctgaggcaatgcaaaagacaattcttttacgatagaccccgacagattaccttgacctccttgaagatatgtatcaacaattcgggctttttcgcgacgcagccagcttgcaaggaaaagaggatcattccccgtatgaggggagagagcgagaatcgcctgattgatcgcgccttttattgcagcgattcctacttccccactggttgctccatatagtgcatacagcacggtgccacgttcaacaatctttgctgaagaattatctaggcctttctcggtcaagaacaattctgtcttgtctgagttaatctcagcggaccggatgaacggaatcgaacctccataataagaggcatggctcccgtcaggggtccctccggaaaaagaatccgtcacatcgcccaacttacgctgttcccaagggtcagtaaaaccagcaaagcgaatttcgggtacagactcaccatctttcgggaacattttttcaagcatcgattttttaaagatgacaagcttgtcatacttacgctgatgaagggtgatgaggctgtcaatctcattcaacgccgcacctatggcagattgctccgacaagccaggaaatcttacttgtgtatcttgcagtgcggcctttgaaacggagatcaccttgattccctgcattaagggaagaagctgtctatggtatgcatcggaatttaggtagtgccccaggtagcccgtcccaaaggggaaccgaggccgcgccggtatcgtatgtagccccgagatagttggctctttgggtagtttccgcagctcaacacacttgccagccgtttcgtcctctgccgtgtcagcgaaaatgacatcaccttcgcgaagtatcgacccagcatatttgggaagcacggtatcgtcggtaatgaacggcaaatcacttcgttcgccatcgaggcaatcgccgaacttaataagaatatctccgtaatgaacattgcgagcagtgccattctcgccattcaaaccggcacgtgaaagagtgttgctcttcaagaactcgaagcaatcccccaacttacgctgttcccaagggtcagtaaaaccagcgaaacgaatcgaaggaactttcgcctgttcagtcatcattcgcctcccaacagggtcttcagctcggcaataccagccatgtcgaactcattgccggtcagctggtcaagcatattgccaagttctgcctcagcctgttcgatctgttcgcacacatcggagtatgtggtcgaatacttgtcgttcagcgcattcaccgctgcaatcaactcatcaacagccgtctgagggagctcctcaagcttgcgctgcaatggttccacccacttggcagcaagcaagtcatcagcatgttcatcgctcagtccttcaataacggtccgggtcttttcatcaagcgctgaacggagattcttaacgttctttttgacttcacgctcttcatcaaacaaccgctgtgcactcacaagagcacggtcaaagtcagtctcgggattcttcccaatcgatttcactgctttcttcaattcagcggcaacgaaagaatctccatcctcgctgacggcatcagtcgaactcttgtcatcctcatccagattttcaagaatgtcaacgatttcgccgccaatatcactcagccgagattcaaatgtggcaatttccgcaagatcagaggtaagaaatttcccctgtacgagatcgaacggcagaatatgcccgacccagccgtccggcacttcgacatccttaccacctttcttcttgacgaccatattggcatcgactttgcgaacggcgtcatgtccctcggcctgtatggtttcaaggtcgatggaaatagtcttttgccaactatcgtcaagcacctgatacgccgcataggcgtctacgagagggataccagccaaacgacgcagcagatcatttgccagagtctcctcttcggcggcaatgcccacattggcggcattacccaccaattcaccgcgtatataagccggataatcgatgaacgcctcacgataacgctggatatatgccttcacatctgagtcggcattcaccgcctcacgaacgtcttgcacggcgagcttggccgaatggccgttctcctccgcgaaaaggcaccggcgcagtccggggaacacgttccaatatttgctgagtgcatcgatgtcccgcttaggaataccgccgaacatagtggaatacacatcccagctctcggcattgtcggaggaatccacgtagcgaggaatattgaggttatagtcattctgccgaatctcatcaatacccaccaagcggctgaacttatcgacgtcacgattccctgtcaccgcatccacgatgcgtttgatatcgctcgcacgcagcttgttgttcttgccttccttggtgaagtatttggaagcgtccacgatgagcacatgatcgtcgtcacgatgtttgcgcagcaccatcacgatggtggggatgccggtgccgaagaagatgttcgcgggcaagccgatgatggcctgaatgtggtggttctccaccaggttccggcgaatagtgccttcctcaccaccacggaacagcacgccatggggcaatacgatggtcatgatgccgtcgtcgcgcagatggtagaggtcatgcagcaggaaggcgtagtccgccttggacttgggcgcgatgccgtattcgaagcggatatcctcgccggcctccggcggttcccaattctgggagtagggaggattcgagaccacagcgtccacgaacagcggctcataggtctcatccttggtctcgtcggtgtcgaaccacggccagtcgcttttcagtgtgtctccgttgcgggccacgatgttgtccggcaggatgccgcgcatgacaaggttcatgcgcgtgaggttgtaggtgttctccttgagttcctgcgcgtaatacctgatgtcattcgggttgccgttgcgacgggccaccgcctggccgatgtggatgagcaacgagcccgaaccgcttgtggggtcatagatgttgatttcctcacggccggcgagatgccaggccacgatttcgctcatgagctgtgagacctcgctcggcgtgtagaactcgccggccttcttgcccgcgttggaggcgaaattgctgatcaggtattcatagatgaagccgagggtgtcgtagtcctgccggctgtccatcggaatgtccttgatgaggtagatgaggtcacgtgcggccttgctgcggcttttctcatcggtgccgagtttggacaggccggtctgcaaggtgtcgaagatgcccgcgaacacgcgcttgcgggcagggtcgatgttgcggtcgaacgcggaaagcgcgtcgcgcacattggcgatggcgaaatcccccttcttcgccacccatgtggagaacaggttatcgtaggagatgaagtagccgcacagatcgcgcacgtactgcgcggtctcggtatcatcctcccgcaattcttcgaggtcttcgtcccccatgccatcagcatgcagacgagtgacttcggtctcggaaaggaacttgtagaagatgaagccgaggatgtaatccttgtattcgttggcttcgatcttcgagcgcattttgttggccgactcccagatcttggcggcgagctgctgcttattcattcatatgctccttgcttctgtacacataatcaagggtctgcccctgctcattgacccattcggtccacccgttttggctgccgccgagaacgaatacagcggcggaggagggactggacagctcggcatcgtccgcaagaatcactttgcctgtctgcgcggcgaaaagctgccgtcgagctgccacggctccttgatttttgatcaccgcatgatcaaggtccacctcggagcccgaaagaaccgtgaaacggccggtatcccggttgtatcgtccagtcgcacgcacgccattcttcttggtgtggaacacggtattcactgcaaccggcgttgtctccttgcggtcgagatcatatccgagcacgcgcatgcggaaaagaatgctgccgtgcaggtcctccacccgctgctctttgtatgggttcatgcgaggagcgggagtattcccgttatcggtctcatatgagccgtgttcacgcacgtaatcgatggccttcgcctcaagcgaatccagaacatcacggtcgatattgacatcgttatcgaggaacatgatggctttgttccagaactcctttttggtcttgtgcgcatcaagtctgacaagtcccctcgtggtttgccccgcgtacacacgactcagcacaccatgatcctcatcaagcaggtaatacacaccgcggtctggcagatcgggaagacacttcgcctcgcccaacatgtctctgggcaccacgacagtgacaagcgattccccctccacccggcaaatacggataccatccggattgttgtcaattatttgtatggtcatggcggtgagcgcaatcaattacttgccgcccttcgccagctcattgatcatgcatgtccttacgaacgccgagaagctcattcctctcagagacgcggcttctttggcggaatcccgcaggttagcgggaatgcgcatggtaactggcaccacgtcaccgtctactagatatgagcgtatctctgtttcaccagcctcatgttcaatcaaatcggagtacgtcatcgcatcccacgctttcaaaccgcagtataaatgcattaattatacacccgcttgggaacagcgtaagttgggggaattcagcaagaagaacaccatcaagaacgctaacggcgctctttcggagacgtttacaaattctgccgagcagggcgttattagccagctcgactacttcgaccacgacattacaaacgatgcgaatatcagtggctactatgtggttcaaccagatgacttcgtctacaacccacggatttctgcaacggcgccttgtggtccaatcaacagaaaccgcctgaacagagcaggtgtcatgtctccgttgtatacggtgttttcagtagatgcgagcatggataaaacctacttggagcattatttcaaaacatccaggtggcatgattttatgttcctcgaaggtaatacgggggcaaggtctgacaggttttcaatctccgacgcaacgtttttcgagatgcctatttggtgcccagaaatctctgaacagatggcgatagcgaagcagcttgaaacaacggataccctcatcacccttcatcagcgtaagcggcagtggttgaaatggttagatgagggtggagagggcacgcatcacgatatcgacatccttgttttcaagttcgcggatgacatgaagataagtgtcctgtgtggtgttcatgcttgcatgaccaagtcgcttggacacactggcaatcgatacgccggcaaacaacaacagcgaggcatgggtgtgccttaacccatgaatcgaaatcacgggaacgttggcccgttcgcaatgcctggcgaggatgttattcgcggtggagttatacaccttgccattcacgaaaatggggtcgctcgcaggcatatctttcaggagcgttgagagctgcatgataagctgccaatcgagctgcacctttcgtacggaggatgcgttcttggtggggacgaatcctccgccgttcttgtaatcccacgttttactgaccgaaagggtctgatgcacgaaatcaaagtcgtcgggtgtgagtcccaaagcttccgagaaccgtaacccggttttcgccaccaacagtatcagccaatcccagcttggtcccttgccgagttcgagatccgcaaggaccgcatgaagctcgaactgattgagatacttcgttttctttgagcatggcggcttgcccttgatgattgccttacgagtcgggtcgcgctgaatcagcccttcgtcgaccgcgtcaagaatggctcctttcaattgatgatggaaatccatcgtcgtctggcgttcgtgatgttcggcgtagccgttgatgagcttctgatagttcacgcgatccatgtcggcgagtttgagatcgggaatgagccggcccaaccatgcctgcgtgagccggtatttcttcatggtcacttcacgaattgcaccttccttgtatacgctgatccattgctcgtagtaatcgcagaacaacgtttcggcgttggtgttgccttcggtcatacggtcttctcttttctggttgatatgcgcttacgccgatgccggatatatcaccagctaaccatatgaatgagcgcacgcggatgatgcggctttcgcgcttacgctgatgaagggtgatgagggtatccgttgtttcaagctgcttcgctatcgccatctgttcagagatttctgggcaccaaataggcatctcgaaaaacgttgcgtcggagattgaaaacctgtcagaccttgcccccgtattaccttcgaggaacataaaatcatgccacctggatgttttgaaataatgctccaagtaggttttatccatgctcgcatctactgaaaacaccgtatacaacggagacatgacacctgctctgttcaggcggtttctgttgattggaccacaaggcgccgttgcagaaatccgtgggttgtagacgaagtcatctggttgaaccacatagtagccactgatattcgcatcgtttgtaatgtcgtggtcgaagtagtcgagctggctaataacgccctgctcggcagaatttgtaaacgtctccgaaagagcgccgttagcgttcttgatggtgttcttcttgctgaattcccccaacttacgctgttcccaagcgggtatacccctgtcatgtcagttgtcctcaagtaaggcaaaaggctcccctgcgcatatgcgcaaaagagccttgcaaatcagcgggagccgttcgacgatattactcgacggtgttcttcggcacctcgatgccgttgccgaacttgacgtcgcgggcggcggccacgcgggacggcaggccgtagatgtcgatgaagccgttggaggacttctggtcgaagctgtcgccggagtcgtaggtggcgaggttgtagtcgtacagcgagctgtcggagcgacggccggtgacgacggcgcgaccgccgtgcagcaccatgcgaatctcgccggagacgtacttctgggtgtcctcgatgaaggcgttgagcgactgggtggcggggctgaaccactgcgcatcgtacaccagctcaccccagcgcttgtcgatgtcacgcttgatgcggtgctgttcgcgctccaggcagcagttctccagctcctggtgtgcggtaatcagagccacggcgcccggggcctcgtacagctcgcgggacttgatgccgaccagacgatcctcgatcaggtcgatacggccgatgccctgggcgccggcgcggcggttcatctcctcgatggcctgcagcggggtgacgtcgcggccgtcgatcttgacgggaatgccttccttgaactcgatgaccacttcgtcttcgacgggcgggaacgccggatcgtcggtgtaggagtagcagtccttggtcgggccgttccacggatcctcaaggaagccggtctcgatggcgcggccccacacgttctggtcgatggagtacggggacttctcggtctgggtaatcggcagcttgtgctccttggcgaacgcgatctcgacgtcacgggtcagcgacaggtcgcgaatcgggctgattgccctcagggtcgggtcgatggacgagatggaaacctcgaaacgcacctggtcgttacccttgccggtgcagccgtgggagatggtgtcggcgccgaactggtgggcggcgcgcacgaggtgcttggagatcagcgggcgggagatggcggagaccagcgggtacacgccctcgtacatggcgttggccttcagggccttcatgcagtactcgttggcgaactcgttgcgggcgtcaaccacatacgcctcgacggcaccgcaggcgagcgcacggttcttgatggtctccaggctttcgccgccctggccgacatcgagggacaccgcgacgacgtccttgccggtacgatccttgaggtacgggatggccacggaggtgtcaaggccaccggaatatgcgagtacgattcggttgttgtctgccatgggatgcctttctacaaaaacaaactgctgcaagtatatacgaatgtctgtatatttatgcaatcggtgtggcgaatactgaaacaggcccttcccgagcgattcagttcttcgacgcgagcgtcagcagccactgcgagcgctcgaaggcgatgtcgtcctcggcgcatatcaccatcaccgtgtcatcgcctgcgatggtgccgagcacgccgtcgatgggttgcttgtcgatgacgctcgccacatactgggccgcgcccgaaggcgtgtggatgacgaccaggttcttggccgacgcgaccgatgtgaccaagccgctgagcacgcgggatatctgctgctcggccttggacccgatgccgctgccgaccgactccctgagcggacggtcgccgatcgtataggcgatgctgccgttggacagtcgcgtcttcatcgcgttgatctcgtccagatctcggctgagcgtcgcctgcgtcacctcgatgccctcctgggagagcagatccgacagttgcgactgggacgtgacgatgtgcttgagcagcacctgttcgatggcgctcaatcgcgcggcacgtgtggccggccgctgcacgggaggtgtcgattcactcatttatgccctttccggtggcttgctgaacgtctgcgcaccctgcaagccacccgcatactacggcatcgagcattaggccagcagcgattcgtcgccccgctgctgcccgatcaaccaggtcaacagcgccttctgcgcatgcaggcggttctcggcctcatcccacaccacggactgcgggccgtcgatcaccgacgcggtgacctccttgccgcggtatgccggcaggcagtgctggaacagcgcgtcgggcttggccagagccatgagctcatcgttcacctgataatcccagaacggcttggagcggatggcgtactcggcttcctctcccatcgacacccacgtgtcggtgaagatgcagtcggcgtcggcgaccgcctcccgcggatcggtggtgaccaggatggagccgccgttctcggcggcgatccgctccgcgtcggcgacgatggcgggatcgggaagatacccgaacggaccggcgatgcggacgttcatgcctgcggtggcaccgctcagcagatacgagttggccatgttgttggccgaatcgccgagataggcgatggtcttgcccggcaaagcatccacaccgccacggtgctgcgcgatggtgagcaggtcggcgagcacctgacaggggtggaactggtcggtcagcgcgttgacgaccgggcaggtggcgtatttcgccatctcttcgacgcggtcctgaccgaacgtgcgccagacgatgctgtaggccatgctggtgagcactcgcgcagtgtcggcgaccggctcgccgcggcccagctgggaaccggacttgtcgatgaccagcggatacccgccgagttccgccacgccgatggagaagctggaacgggtgcgggtggagggcttgtcgaacagcacggcgacggcctgggggccggcgaacggctgacggtagaagcggttctcgcggaatttcatgccgagttccagaatctgcttctgttcggcatggttgatgtcgtcgtcacgcagcatatggcgaagttgaccggccatgaggtgctccttctgtggttcgggatgggtgcggatgttgtatcggcttgggcgtgcggggcgggctggttgtcgcggcccgtcccgtaatcgtcgtggaggtcagtcgttgggcaggtcggcggggatcttcgcgaggatggacacggcttcgtcgatttcctgctcggagacgatcagcggcggtgccaggcgcagtgcgtcgggtgcgaccgcgttgacgatcaggccatgttccagggcccagttcatcgccgcatgcgagcagcggtgggacaggaggatggcgttgagcagaccgcggccgcgcacggaggtgaacagcggattgccggatgccatgacgccctggcgcagttgctcgccgcgctcttcggcgttctcgaccagatgctcgttctcgatggtgtccagcgtggcgagggccgccgccgcgcccaaggggttgcccgcgaaggtggagccgtgggatcccggcgtgaacagcgcggacagcttgcctccgaatgagatcatgccgcccatggggaatcctccggcgacgcccttggcgaacgtcacgatgtcgggagtgatgccgcccgtcaggtcctcgcgctggaacgcgaaccacgagcctgtgcgaccgatgccggtctggacctcgtcgatgatgagcagggcgtggttgatgtcgcacaactcccgcaccttcttcacatatgcgacgtccagcggacgcacgccggcctcgccctgaatgagttcgaggatgaccgcggccacaggacccttgccgtactggccgagtccggtggcagagaacgcctcatacatcgcgatggggtcgcctgcacgcacgaattcgatgttcggcaccagcggctcgaacggcttgcggatcacgggcttccacgtggcggacagagcgcccatggtacggccgtggaatccgtgggtgagcgccaggatgcgcgccggcttgccgccgatgctcgggctcgcgcccggcagcgtgcgaccgtacagcttggcgagcttcagcgcagcctcattgccttcggcaccggagttgccgaagtagacgtgggagccttccggggccccggcgagcgcaatcagtcgcgacgcgagcctgatctgtggctcggtcgcgaaatagttgctcacgtgggcgcatttcgcggcctgcttggacaccgccttcacccatgcggggtgcgcgtagcccagcgaattgacggcgatgcccgcgaggaagtcaaggtattcgttgccgtccacgtcccatacgcgcacgccttcgccgcggtccatcacgcgcagcggcgtgccgaacacgttcatgtggacctggctgtactgtcccagccattgcgagtcggtggggccgagcgtttccttagtaggcataggaactcctcatttcgatgccatcatcgggcacaaccatggtgccgatgccggcggtggtgaaaatctcattcaggatggaatgcggcttgcggccgtcgatgatgtgcgcctgcggcacgccgccatcgagggcgcggacgcaggcctccatcttcgggcgcatcccggattcgaggtcgggaagcatgtcacgcaggttctccacaccgatgcggccgatcagcgagttcttgtcgggccaatcggcgtacaggccgtcgacgtcggtcaggatgatcagcttcctggcgccgagtgccgcggccagcgcggcggcggccgaatcagcgttgacgttcagcacttccgtggcgtcgtcctcatcgggggcgaccgaggagacgacggggatgcggccggccgagatcaggtcctccaccgcggaggcgtcgacgctcaccacgtcgcccaccagcccgatgtcggtaggcttgccgtcgatgatgggtttgcgctgcatggcggagaacagggcgccgtcctcaccggacagtcccacggcgaacggcccatgcgcgttgatcagtccgaccagttccctggacaccttgccggtgagcaccatacgcaccacgtccatggcctccggagtggtgacgcgcaggccgcccttgaactccgacttgatgcccaatgccttgagcatgtgcgagatctgcgggccgccgccatggacgacgaccggatgcaggcccacctgccgcaaaaacaccatgtcttcggcgaagcaacgcttgagatgctcgtcgaccatggcgttgccgccgtatttcaccacgatgcgctgcccggcgaactcctccagccacggcagcgcatcgatcagcacctccgctttctggtcggcgcgcagatcggtgtgcacgtcgaaatggaaccctggtcccttcagttcagtagccatattctcctctatcgcatcccgcttctctggccggcatgtgccggggaggaaccgggagactagctttcgtaatcggcattgatatgaacgtactcgtgggtgaggtcatcggtccacaccgtggcctgttcgtcaccggcgttgagatcgatgtcgatgtgcacctcgcggggggtcatgtcaacttcggagcggtcgcgtcccgcgcccccattctcgcagatcctcacgccgttgacgtccacggtgaccttctgcgaatcgtagggcgcctcttcgacgggcacggtgcccagcgaggatacgatgcgtccccagttcgggtcgttgcccgcaatggcgcatttgagcaggttcgaggccgcgaccgcgcgggcgcaggccagggcggcgctctccgtggtggcgccggtgacggtgatgcgcacgtcgtggctcgctccctcgccgtcgccgatgatctgccgggccagcgatgcacatgccttggcgaccagggcgttgaactcgtccggatcgggctcgacgccggacgcgccggatgcgagcagcagcaccgtgtcgttcgtggacatgcacccgtccacgtcgatgcggttgaacgaatggtccaccgcggcgttcagcgcggcctgcagttgaccggcgccgacggcggcgtccgtggtgatgacgcacagcatcgtggcgagctggggggcgatcatgcccgatcccttgaccatgccgccgatgcgatatccgtcgccttccaacgatacggtcttcggcttcgtgtccgtcgtcatgatggcgtgggacgcgtcgcttcccgcctggtcgtcgtccgacagggccgcgtacgcgctttccactcccgacagcacatgatccagcggcagcagctcgccgatcaggcctgtggagcatacggcgatctcgtcgggctgcgtcccgacgagctccgcgaccttcttggccgtcgccgccgattgctcgtatcccgcctggccggtgcatgcgttggctccaccggagttgaggatcaccgccttgatatggccgtcggcgaccgtcttgcgggaccactgcaccggtgccgcgcagaatcggttgaacgtgaacacgccggccgcgctgtcgagcggcccctgattgacgaccagggcgagatccttcttgccctcgacggaggagatgcccgccgcgacgcccgcggcgctgaatcctttggcgaatgtgacactcacggtgctactccaatcttcgtaagtcccttgtcttcgggaagtccaagtgcgacgttcagcgactgcacggcctggcccgcggtgccgcggttcaggttgtcgatggcggcgaaggcgatgagacgcccggcgtgccggtcggtgaccacctgcacgtgggcggcgttcgatccgacgacgttcgccgtggccgggagcgtgcccggctccagcagcacgatgaactcctggccggcgtatgccttggcccacacgtcgtggatttcctcgtcgctcatggaaagcgccttgtcggtcatcttcgcgctgaccgtggcgaggatgccacgcgccatcggcgcgagtatcggcgtgaatccgagcgtgaactcctcggcccgggcggcgtccaaacccgccgcatgggcgaagttctgcaaaatctcggggatatggcgatgcgtgccgcccacgccgtagggcacggcggagccgaacgcctcggcggcgagcaggttcgtgcgcttgaggttcttgcccgcgcccgaataccccaccaccagatcggcgacgaggtcacgatgttccacgagtccctcggcgatggccggctgcatggcgagcgtcgtcgcagtcacgttgcagcccggcccggcaatgcgcttggcgccggggagcaggtcgcgctgacgcgtgtactctccgtctgcgctcttgccggtgatcagctcgggcatgccgtacgtccaatggtcgaagaactcgcctccgtagaacgcgtcccacgcggagcgctcctcaagacgatggtccgcacccaggtcgacgaccacggcaccggggtcaagctgcgcggccaacgccccggacgcaccgtggggcagcgccaggatgatcacgtcatggccgttcagcacttcggcggtggtgtcctccaccgtcagatccgccagctggggaatatgcggcatatgccgtccgagtttctgccccaccgaggaatggcccgccacgcaggtcacctcgaagtccgggtgggcggcaaggatgcgcaacgcctccccacccgcgtatccggtggcgccagccacagctaccgtatatctcgccatatcacgctcttttcatcgaagacgaactacggcgagtatacatgttatgcagtacattgcatatattcattcatcggcttgcgtgtcgcagcacacggcccatcacaccgaaacggagtcccccgacccgcttccgcccgtgccgggcgccagcatgttgagcatggcctggtacatgtcgtccatcgatatgccatgcatcgtcatccatatgacgatgatggtggtcagcacgttgatgacgacggccgcgatggccagtccgcggccccgcgtatggaaacgacgggtgcgccagatggccaggcagccgatcagtgcgggcagcaccgggaacgaggacaccagggcgaagatgaacgagaatatggcgtagaaatcccaatgcccgtaaatagggttctgctgcgggtcgttgaggtcgatgccgttgaaatatcggggaggctcccgtcggggaccgccttggtcgggcccaccctgagccggagccgcattgggggcggaaccgccctgagcgggagccggcccggctccgaacacggaggccggatgagacggcgacggctgcgcctgcggagccggctgctcgggctggcctccatatacgtaagggttgtaattcggcggaaactcatccgccctggcaccatattcaggctcgatgcgctgaccgtattgcggctgggccgcaacatgccgggactcgcccgaactatcgtcagacgattgcggctgttgttgcggctctgtcatatgcatgtcctccatggtgccttttcgtcggcggtcaggcgcgcagctgcgcgccgatggcctccgccttgtcgacgatggccttgcgaatggcctcgctgtcctccgcggacagtgtcttggacggggagcggaaggtcaccgcgaaggcgagcgacttcttgccctctcccacctgctcgccggtgaacacgtcgaacagctcgatggattcgaggttggcgccggccgcctcgcggaccacggcctcaagctgggccgcggtcaccgactggtcaacggtgaaggcgaggtcctgcttgacgggcgggaacgtggcgatgggcttcgcctgcacgggcttgccgtcaagcgtgccgaacagcgcggtaaggttcagctcgaacgccgcggagtgcgccggcagtcccagcgcctcgttgacacgcgggtgcagctctccgaccatgccgacgacctgttcgcccgcgacgatctgcgcggcgcggccggggtgccactgcgagggcacatcctgcgcggcgggctgccgcagctcgtaacgcgcacccaaacggtcgcagacacggcgaacggcctcgacggcgtcgctccaatcgacggcgcgacgatcgccgagccatccggagtcgaccgcgttgccggtcagcaggccggcgacgtgcagcggctgatcgggaaggcccgcatccagcgcggcaagctgctcatcgctggggcgtacgcctcccggaagagccgggatggcgggcgcgttcggatcccacaggtacacgtggccgatctcgtacaggcggatgtcttcgaggcctcggcgcaggttgcgctgcacggtggtggcgagcgtggggagcacatcacgacgcaggtacgggcggtcgccagccagcgggttgacgatctcaacgctcaccggcttgatgaccgccggatcataggagaacgccttgaagtcctcatcgccgacgaacgggtagctcagcgactcgaccatgccgtattcggcaagcgtgtctgcgacccagcgctggcgacgctggtcgggggtcagcccgaccgtgcccttgaccggggccggaggcacggtgacggggatctcgtcgtagccgaccagtcgggcgacttcttcgaccaggtcgcacggctcgttcagatcgggacgccaggtcggcgcggacacagagaactcgccgttgccgccaccagcgacacggcatccgacatcggtgaggatgtcgctgatgcggttgacgtccacgtcgagcccggcgacgcgggcgacctcggtggccttgaaggggatcggacggcgatacatcgtcgtgttcacgtcggtcgggtgcccggacggctcgccgttgccgaacttggtgagcagttcggccgccatctgcgcggccgcgggctgcagctgcgtgtcgacgccgcgctcgaaccggcgggacgcctcggaggggatcttgtggcgtcgtgcggaacgtgcgatggagacgctgtcgaaatgcgcggcctccagcaggatgttcttggtgtccgcagtgacctcaccgtacaggccgcccatgacgccggcgatgccgagaatgcgcgagccacgcttgccgtcgggcgaatcggtgatcagcaggtcctcgacgctcaggtcgtgttccttgccgtcgagcgtggtgagcttctcgccttcggccgcgcgacgcaccacgatcggcccttcgatcttgtcaaggtcgtaggcgtgcatcggctggccaaggtccagcatcacgtagttcgtcacatccacggcgagggagatcgaacgcatgcccgcgcggataagacggcggcgcatccagttcggcgtgtgattcgtcgggtcgaacccgtggatggcgcgggcgacgtagcggtcgcagccggtgacgccgtgaatcgggttgttgtcgtcgacgatgacctcgatgtcgctggagacgccggactccgccgcgggagcggcgggggcgcgcttgttgagctcggtcaccggatcgacgaacttcgcgccggtggaatgatggtattcgcgggccacgccacggtacgagaacgcatagccgcgatccggggtgatgttgatttccaggatcggctggtcgaggtgcagcaggtgcatcgcgtcgtcgccgggcttgagcgccttgtattcctgaggcgtgaagccgtagtcgcgcagcaggatgatgccttcgtggctgtcgcccaggccgagctcgcgctccgaggcgcacatgccgtcggaaacgtggccgtaggtcttgcgcggttcgatcctgaaatcgccgggcagcactgcgcccggcaaggtcacgacgaccttctcgccggcggccatgttcggggcgccgcagatgatgccgcgcggcaccttcttgccgttctcgtcgaccgcgttgtacgcggggccgacgtcgacatgacaccagttgatggtcttgccgttcttctgcggttccggcgtcgcgtcgacgacatatccgacgacgatcggaccggtgacctgggaggcgtggatctcctcctcctcaagaccgaccctgaccaggtccttggccagctgctcgtaggtgaggtcagacggaacctcgacgtgctccttgagccaatcaatgtcaaccataggcatgggcttctcactcccccatcacaaactgttcgctgaatcgcacgtcgccctcaacgaggtcgtgcatgtcgttgatatcggaacgcagcagcagcgtgcgctccatgcccacaccgaacgcgaaaccggtgtactcctcggggtcgatgcccgcggacttcagcacgttcgggttcaccatgccgcagccaccccattcgagccagcccgcgccgcccttcttgtcggggaaccacaggtcgagttcggcgctcggctcggtgaacgggaagtagctcgggcgcagacgcgtcttcgcctcgggaccgaacatggccacggcgagcttgtcgagcacgcccttcaggtcggccatcgtcaggtgcttgtcgacggccagagcctcgcactggtggaacacgggggtgtgcgtcgcgtcgagctcgtcggtgcggaacacacggcccgggctggcgatgtacagcgggacgccgcgggtcagcagggcacgcacctgatcggaggaggtctgcgtgcgcagcaccatgttggagccgacgaagccggccgcgtcatgggcctggttgcccttgacatagaaggtgtcctgcatctggcgggcgggatgatccgggccgaagttcagggcgtcgaagtcataccattcggtctccacctcggggccggcggagatctgccatcccatggagatgaacaggtcctcgacgtcctccatgagcttggccagcgggtggcgggcgccgagcgggcgacggttgaccggcagcgtcatgtcgacggtctcggcctccagcgcgcgctgctcctcctgcgccttgagctcggcctccttggggccgaacgcgcggccgaagtcggcgcggagcttgcccataagcttgccggcttccttcttctgatcgaccggcagcgacccgatggccttgctggccttggtcatcgccgattcggcaccggcgtattgcgttttgatggctttgagctcctccaagctggaggcgttctgaatcttgctgatgccctcggcgaccgcatcggtcactgactgggcatcgaagagagcattgtctgccacgagaaccctttcgtcctacctacaactaccgaaactaccggtttatctgcgccaaaaatcaaataatccaagcgtttaccgagttcacattgtccctatatggctcgacatagccatactcatgagcatgatcgcggcgctggtcgccagattcagcgactcggccttgccatagagcggaatgcgcacgatgtcgtcgcacctacccagcagacccggctcaagtccgcgggcctcgttgccgaagatcacggccttgcccaccccggagagatcctggtccctcagcgcctcgggcagctcccttggctcgcgcccgtccgtcccgtagacgtcggcggcgacggtgcggagcaccttctcgccggcccagccgaagaactcgtccacgcccatcgtcatcacggggatatggaacagcgagcccgcggtcgcgcggatcaccttgggattgagcatgtcgacgcaatcgtcgacgaacaccacggcatcgcatccggccgcgtccgccgcacggataaccgtgcccgcgttgccggggtcgcgcacctgccagaacgccgcgacgaacggcttctcgggcaattgcgtcccctgcgccgtcgcgcgcaccgcatcggcgtcgccgaccgccgcaatgccctggcaatcggggctgatgcggcgcatcaccgcctcactcgccggatgcacatatatacggtgttcctgggatcgctcgacgatggacgtcagcgtctcgcctgcgatccgcggcccgtccggcccgtccgcggcctgcacataaaggtcacggacggcgccgggcatccacatcaccgcctcgcgaaccgactgggggccctctatcaggaaacgaccgaaacgctcccgggtgcggcggttggcaagatcggccaccttacgcacgcggtcggccttcatgttgtctatcattctggaatcgatcggcatgactgcaactgtacgcgccaagcgatacagcggtgccgggcgccacgattcggccggctcgccgcgtgcgtctctaacactggactaagaaacgctgtcaacatcgactatggccggcgaacgggtaacgttgccactatgcaaatgttgttcacagcccgtagggtctcctgcgtcgtgccttctgcgcagtcagaccgcaccatcttcgagaatctgtcgttcgacatcgatcgcggccagatcgtcgatctggtcggcccgtccggttccggcaagagcagcctgctgaccgccttcgcgctgctcaacccccatgccgacggcacgttcacgctggacggcgcggacagctcatcgttctcgctgcagcagtggcggaggaacgtcgcgtatctgccgcagaagcccatgctgatgggagacagcgtcgccgacacgattcggcttccctggacgctggccgtgcgcagagcgggcgaggcgagtgcgcccgacgaccatgcggccaccggcaagaagacttccgcgagacgcggcaggttcagccggctgttccgctccgaacagtcgcaggcgaagctggcgctacccgaccagctcattcgcaatacgttggacgccatgggatgcgaggatatcgacctggcccgtgcgccgcacgacctttccggcggtcaggcggcccgcgtcagcctcgcgaggacgctgctgacccgcccggccgtgctgctggccgacgaggtggacgcaggcctcgacgacgacaacgcggacaaggtcgcctcgatcatggccagcgcggccgccaggggcatggccatcgtgcgcatacggcaccgtccgcccgacggccgagccacacgcatcgtcacactgtcctcagggaggctgtcatgagcggcaacggttacgtgatcgataattggggccttctggtcgcgctgctgatggtggcggtcgcggcgctcgtctccgagctcatgcgcatcagcatcggcaagacgctgatgtggtcggcgatacgcgcgctggtgcagctgtgcgtgatgggcgtgatcatcgggtacgtgatccgctccaacaacccgtggctggtgttcggcgtcatcgcggtgatgctggtcgcggccgtgcagatcacactctcccgcgccaagggcatcccgaaggggctcgccggcccggtactgctcagtctggtcataaccatgctgctgatgatctcgctggtgaccgagctggtggtgcgcccgcacccctggtatgcgccgcagctggtggtgccgcttaccggcatgctgctgggcaacaccgtgtcggcgctcgccgtcggcctgagccggttctatgagagcatgaacgagcgccgcgacgaggtggacacgctgctcgccttgggcgccaccccgtgggaggccgcccgtccttcgatcgtctcgtccatacggctgggattgctgcctaccaccgcctcgctggcgtcgtgcggcatcgtgaccatccccggcatgatggccggccaggtcatcgccggcggagacccgctgaacgcggcgaaataccagttcgtcgtgctcgccgccatcgccgcgctcaccctcgtggccgacgcgctcatcatgacgatgacctatcggacctgcttcaccgacaaggaccagtacaagccgcccgaggatcgctgagacgacgggtgcgcagaagcgcgacttgcattgccgctgagccggcggaactcatccggctcagcggtaactgcgttctatgaggatgtcggagacggtcaggttcgcgtcgttgaccagattgaacaggatcactcgggccagttcgcccggatccatgaaggtgtgctgcttctcctccgacacgtagtcgcggctgtcgcggtagaacgcggtgtcgatgccggccacgaaccagccgtcggcgatcagctgtttggtcagctcgtatcccaatcccagtgcactaccagtgacgatagcgatgttgcggccgttcgagttcgttatatcatgctccgatctcccatacaatgtatggtcagagtatcggaccattcagacccccgccgcaccggccacccgattggtcccgcgcagatccccgtcagccggcgaactgcgcggcggatgccgggcaccaccgcgcgaacggcgcgatgttctcctcgccgtccccttgcgccgcggcacggaccgaagccagccggacggccatccgggcacggacgacggcataataccgggcgagccatccattgatcagttccatcatgcgagtcatcacactcaccttgcctttccatcagggtgtttcaaggatgcagacggtcacatgaacgacaaaatattaatttcgtcattctcgcgatgtccgaatcatcgattgagtccctctcctgcagcaagaagaactgatacctacgatagggatggaatgtaacgacggcaccggcgcaatgatacttttgcgcatcaaaagaaatatagtattttcatatacgttacatcacgcagggagcggcaatggggcacttcggtgcacaggcggcgcgaccgggcccggaacctggcagggcgggcaggaagaccatcattctcgtcggatctttcggagcggatcgactacaacatccccgacctgcccatatatgccagacgggacgcattgtcgtcgttcccggactaccgctgcccatgtcactggcatcgcgatctggaattcatccatgtcatcagcggtcagatgcaatatttcgtcaacggcgccatagtgacgctggaagccggcaacggattggtcgtcaattcgagccggctgcattacgggttctcgccgcagcagaggcaatgctggttcacctgcgtggtggtcgacccagaactgcttgagctgctcggcgcggatgagcgggttttcgtcggcgagctacttcatcaacgtgttccgacggcggcgaggcgtcactccgcgcgtctggcgtgagtcacgctacgtgggtcgtgtcaccgtgcgagaaggcacgcacagtgacgtaaccctcgcacggtaacacgacccacgcacagtgacatacctgacagcggccacgaacccgctacaggatgtcggggtcgtccttgtcgatggtgcccgtggccttaccgatggccttgagcccgtggtaggcgacgaggatgacgaccgtgccgatggcgatgccgttgaactgcacgccctggaacgcgaacgtgaaatcggcgatgccgatgatcatcacgatcgcggcgaccatgatgttgagcggcttgtcgaagttgaccttgttctccacccagatgcgcacaccaatcatgccgatcatgccgtacagcagcgtggtcacgccgccgagcacgccgccgggaatcgtgttgatgaccgcgccgaacttcgggcacaggctcagcagcagggcgaatgcggccgcgcaccagtaggcggcggtcgaatacaccttggtcgcggccatcacgccgatgttctcgccgtacgtggtggtgccggagccgccgccgaagccggcgattgcggtaccgaggccgtccgcgaacagcgcggtgcccatatgcccgtcataatcgcgcccagtcatctgcgccacagacttgacgtggccgacgttctcggcgaccagcaccagcacgacggggatgaacatcggcaggatcgagaagtcgacctgcggaagatggaatttcggaaagccgatccacgccgcgtcgccgatggccgaaaagtcgacctgaccgcggaagcatgcgtacacatagccgacgatcacaccgagcaggatgttcagacgtccgacaagaccgcggaacagcacggcgatgagcagcacggcgagcagcgtcaccagggcggtgtcccagcccttctgccagttcgaccacacgctgggagccaggttgaagccgatgatcgcgacgatggcgccgttgacgaccggcggcatgatgatgtcaatccacttcgcgccggcgaagtggacggccacgcccaccagggcgagcagcaggcctgtgaccatgatgccgaagctggcggccggaatgcccttgcccgcggaggcgacggcggcgatcggggcgatgaacccgaacgacgaccccaggtagctcggcagcacgttcttgttgatgagcaggaacagcgcggtcgacatcgcggtgaagaacagcgtcgtcgacgggtcgaaatgcgtcaggatcggcaccaggaacgtcgcgccgaacatggcgatgacgtgctgggcgccgatgccgatggtacgggtccaggtcagtcgctcatcgggctccacgacctcgccgggcgcgagcgtcttgccatcgccatgcagtttccatgtgaacaggtttcccatcacgaactccttcggttctctcaggtggcacatccatgcagccatgtgccgcgttgaggccattgtaacccgttcgcccaccgttgcgatgacgagccacgcgcggcgcgcgactcgtcatgcgcggcccgtgagcgccgtgaggcgcctcgtgcagtcacaggtgcgggtcgactgaatgcaccacgtcgacgaggtcgccgttcgagagcaacgggcgctggaattcgcgccacggatcgacgcgcacctcccagcgtccggtcgactcgtcgaacaccgggcgcgcggtctgctcccagcgcacgcgcgacgacgtgcggccggtggccgggtctcgccgcgaataatgcaggcacgtgcaattggtgatcgcccatgccgggtcgtcggcgcggcgcatgaactcctcgtccgacaggtcctccagggtgagcatcagcgcgagcatgaagtcgccgtgcgtgacggcgacgacggattccgcctcagcacgccggttgagcgacgtgagcaggttatgcacgcggttctccgacacgtcggcaatagactcgcctgccggcggacgccagtacagcgggtcggtgcgcttgaacatccagttgcgcgcgtagttcgtgcggaaatcgtcctgcgtgatggtgttgatctcaccccaggagcgttcgcgtagcacgcgcgtctcctcccacttggctttcggcagcgccatcgtcgcggcggtttcgcgcgtgcgtacgtatggcgagaccagataccggtcgaacagctgctgttgcgcgacgagccagcggccgatgcagtcggcctgcttgcgcccggtggcagtgagtcgccacgaccggtcgggcacggtcacgttgtcctgcgtgtacagggagttatcgccctgctcccccgcgttgatgatgacgttcgcctccgactctccgtgtcggatgacatataggtccaatggcattcccatgaatgcgtttcctcatttcgttatcttgctatgttgctgtgtttgctgtcttgttgcgttgtgtttcgttgtcttctgtcgccgccgtcttccgccgtttcctgccgtgctgtcccctcgtcccgccgtttccgtcatcgtcagagcggccctgccgtctgccgcgccctgcgggaatcgtaccgcttcgattcaagttcgcggcatggcttcgcgattcctccagattgctccagccttcccccacggtacacgcaatcatgccgcttcgcagccgcgctcatgcccacagcgcaataattcacgcacatgtcaccggtgattcaactgttacccggtgcccgacgttccgtggcgagcaggacgctgaggcggactgcggaacgcgcttccttctggcatatggcgaccaggaccgcacgatacccgtcgaggatcaggatacggcccgacgggtgatatccggaacccgcggcgcgcggctgtgcatgtacccgggcatggcgcatgcgatctgcgaccgcgagatcgacgacatccgtgatttcctgagataggggctccatgccctcagatacgtcagcgggctgaaacggaggctcccaggccgggagcgcccatttcagcccgctggcaacgcgatgccgggaatcagaagaacagcacggcgacgccggcagcgaacagcatcagcaggatcgacacgaggaagctcgcgaggaacggcttgcggcccttgaccgcgatggccttgaagttcacgttgatgccgagcgcggccatggccatgccgagcacgatgtacgcgaagtccacgagctgcggggtgatggcggcgatgaacggcacgaaggtgccgatcacggacgcgccgatgaagccgagcatgaaccaggggaacgcgacggagcgtttgccggtgggcgcgacctcggaatgcttcttctcccaccagatggcgatgatgatggcggcgaacacgagcatcagcacgcgcgacagcttcatgatggtggcgatgttgaccgcgttgaaggcgtcgccggcggcgaccgcgtgggcgatctcgtgcagggacgcgccggcggtgatgccgagctggtcctgcgtcatgccggtcagggggccgagcgcgatctcaagcaacgcgaagatcgtgcccatgatggcgacgatggcgacggccatggttacgtcgtcgtccttctcctgctccttctcgggcggcaccttgatggagccggacaggcccatgacggcggcggcgccgcagatgcccgtgccgccggcggtcaggatcgcgagcatcgggtcgacgcccatcttgcgcgccacccagtaggtcacgacgatagtgagcgtcaccacgaccgcggcgatgggcaggcacttgatgccctgcgtgaacagcacttgcaggttgagcttgaagccgagcaggatgatgccgaggcgcagcagcttgttggagatcagcccggccgcgtccttgacgccggccttgcgcttgtcgctggcaccgacgtaccacttgcggatcgggaactggatgatcatgccgatcagcagcgcgatgatcagcgcgccgaacagtttgaatccggggtattgcttgagccatgagccgatcagtgaagcgatcagggtcaggacggcgatgaacagcatatcgacggtggcgatgcgtttccaccatttcgtacagaactctctcatgatgtccattgaactaccgtcatatgccatcggtcaaatcagtgatagtgatggatggtattgatatttttgatgccagattgcagcgaatcgttctcaataagaaaggtgcgagccagacgcgagcggaaacgaacacaaacaccgccgaaagcccggaattccgggcttcgtcggcttgttcacttgtgcgaaaatgtgaggaatcctcgcacgtttcttattgagaaccattcgctgcgacacagtcagccgcgcagggccgtaatgactctgccggcaagttcccgctgccccggcgtcagaccggaacgcggcaccaacgcatagaaccgccgcacgaactcgtcgcccagctcccgtgtcggcacgccggccggcacggcggccgccgacaccagggagcagccgaaaccggccgcgagcgccgcgccgatggccgcgttattggcgacctcgatcatgcgagacggcatggagccgaccgtcttgaagtacagatccgtgtaatagcgcacgccggagccgtgctcgcgcaccatccacacgccatgcggatcaccggccagcaccagcctgtcctcgcgcagcgtgacacgatcgaccgagtcgttgacgatgggcttctccaccacacccaactgcacggctttcataccggcctgttccaggatcgcgtcggaattgagcacccgaatcgagcagtcgaagctgctcagcgcctcggccatcaccggcagtgcgactggcagcagcacggccgccgtggtgtgcgagaatgcgacggacaacggctcacggctctcgcgcatgcgggcgatctgctcgcaggcgtcgcgccacgtgccatcgatgccggtcgccgcacggtacagcaaccgcccagcctcggtcggcgtcacatcgcttttggcattgcggacgaacagcggcgccccgaccatgcgctccagttgggcgatgcgcgacgacaccgtggactgcgagaccttgagctcgtcggcggccaacgtgaactggccgatctcgtagaccgcgaccagagtgtccagcaaggggaacatgaaccgctcctttccgtcgtgttcggcaacgcctgccggaacgtcagtgcgtccgttccggcaggcgttgccgatcggcttgcatcatttgacctgcgtgatccggttgccgctgaccatgaacgccgttctcgccatgtcgatcatcggctggtcgaaccggctgtcggtgtagaactcgtcgatgaccgtgtccgggccgacgacttcgcggaaccgtttcggcttgttcgtattgaaattcagacaggtgacccgcatcgtccgcggatccacggtggatgagaccagacggttcaatccgagacgccggcatgcctcccccacggtcacgtcgaacgatgccgtcaggatcacgtcatccggacgcggctcataccacggcttgatgcggtccatatgccggttccagaactcgttcaccaacgcggatacgccctctgcgatcgcggtctccccggcgagaccggcatcgggagccgcgccgtccagtcgcagtatccgtcgggaagccgcgacatcgtgcaggtaatcgcacgtcacgccgcccacgccgcgttccatttgcgcaagcgtggcccgccccatcttgtactgcaccgcgtatcgcagcaccggagccagatgccgcagcaccttcggctcgtatcggacactgaacatatacaggtcgaacaggctttcgccgtcatatatcgtgccgtcgaaatcgaacaccctcatcgcgtctcgttccctctcaccctcgcgccgctcccggcccgtcagaactgcgcatagtccgcatccttatgttcccccgtctcaaggtaccgtacaagatcgtcggacgacgagaacacagcgcgcaccgactgggcgatcatcaggttgatgctgtcgccgtcgcgcaggccctcgcgatatgcgtacacggggatgccaagagagtgggcgaatccgatctcgaacatcgtgccggaatcctcgtccatcagattggctatcaccgccttggaagcgcagatgccgttcacgtcgtcgtcgaagcagcccgcgggaccgacctcggcgatgtcactggcgaaccgcggcctgaacatcgtcttgccgtgggtgtcgagcacatgctccaagcgttccatcgacgcgacctgctcgggattgaagaacgggccagcgacgtagaaatcgtagcggcggcgtttgcgcgaataggctttctcgcgcttgcggccgggctcgcgatcgggctctcgcccgtccgccgcttggcccgcctctgcgcccacatccggctccaccatctcgacgaacgtctgcttcatcgtatccagcagcgactgcgtgctttccggaacctcgtcgcccgctccggcgacgtccttggtgagtccctcgatgcggcgacgaatccggtcggcgtcctgcgggtcgatgctgaacttcgccacgagcgactgccgtatcgtctcataatcaaggttgacgaagaagataagctgctgcagcttcatgaagttcttcagctcggggaaccgctcgacgatgtacgtctcgcgatcatccgtggccctcacccagtcgcgggtcagctgcatgctccagtcgccggtgatggatccgcggcgcatgcggtaatggtacagcgcttcgggaatgcgcacgacgcgatgcgactcgccgatcacattgcagatacgggccatgtcctcaatcttgcgcccgacggggaaggagaacccgtgattacggtagatcgacgccgccgcgacgaacgaccagaaatacccgtcgatctcggccttgacctgcgccttgatcgcctcgatcggggtcatgatgatcacgtcgtcataatggttgtgcttgtacgaggatgtcagcggcttgccatcttcgctgatcgtgtcgaactggaacatcaccaaatcggcgtcgtagtcgcgcatcgtcgccatcgcacgttcaatgagattgcgctcgaccatgtcatcggaatcgacgaagtagatatagtcgccagtggccttcgccagtccgacattgcgcgcatcggacaggccgccattggccttgtggatcacgcggatccgctcatccctcgccgtccacgcatcgcacatcgcagggcagcggtcgggcgacccgtcgtcgacgagcaggatctcaagattgcggtacgtctggccgaccagtccctccacgcacgcgtcgagataccgctcgactccgtacaccggcacgatgaccgacacgagcggcgtggccccgtcaccattcatggcctccgccatcacattcgacgatgtttccgattccgctgacatgcccctcctcgatgctccccgatccgttcggctccactcactgctgacgcacagcggcacgtgcgtcgccctccattgtccatgataggccagggcttgcgcagggcggacgactccatcctgttgtttgccatatcttaaccgcgccgctcaaccgtgccttttacccgcgcggaaacggcggcagaacgccatgccggtgtgcgtcggccaccggattttccatccgccctgaggtcgcgtagacccctcccgtcagtcttttgacaccatgcagcattttgccgagccgcgcaaccgatcaccgtggcgggatgctttttgccgtatatggccgccagcggcgacagcgcggcgatcaagcagatgctcaacaacatgtccagcgaagagctcctcaaatactatgacggggacagctcgatcagcgcatcgctgttcaacgatcgcacattcccgttctgggcgttcctcgtgctgtcggcgttcatcctgttgttcgcgctgcttcgtctgcacgccgccacgctgacgttctccatcctcaacctgctcttatgcgctttgtacgcgggaatactcatcttcattctcgtctccgcctcccacgagatggatgtcgtacgctcgacggcatctcagcctgggctgaatctcgccaatgacctgtccttttcactcgttccgtcgtatgggatgtatgcgatcatcgcgggaacgttgttcatgttcgtgggagccatcgtttccgtggtgaatcgcagccatgcgcgcagggcggcattcgccagtccggctccggcgaatccgcccgcagtcgcgtacggtggcatgccggcgcaaaactacggagccgcgccgggcgccggagcggcgtatcagcagcctgccgtgccatatagcgcgcaaccacagaatccggctggaggaacgccgaacacaatgcgtcccatgccactgccgccgcaacactaatccgcacaacccgcagactccgctgacatccacaccgaatcagcggagttcttttatgccgccagacgccgactggcacaacggcgcgactcgccgaactatggttccgatacgggccgcactggaatatcatggtgtttatagcaacgctgcgagagaggtgggagatcatggaatattgtccgcattgtggtgccccatatgacgagggcagtcggttctgcttccagtgtggcgctccgcggcaatccgccgctggagcgccgggcgctcctgcgataccgaccgctccgatacccgtgtcgggctatggcaacatggcggcgcagccaccggttccatcgcctccgagagcatccgagacggcatccaatgatggttttgccgcattcgcagcgaatgcgggtgatgccggcacacctccgaccgtccccgccggaaactccgccacgccaccggccaatcccaccggatccggcgccgcgcagccgtccgccaagcgcccacgcatgaaactcatcgcggcgatcatcgccgtactggtggttctcgctggaaccgggttcggtctcgccgcgaggaaactggaatggatcggcccgcgcaccgtgccgacggtccgataccgcacggcagccggagtgtcacgtgagctggagaccaaaggctttctcgtcaagaagaagcagatgttcaacgccctgggcaagggcaagtgcctcggtctggtaggagtcaaggcgggcgaccgtctgcccaagggcacgacggtgacggtcatcgaatcgatgggacccggtgtacccgaaggcacagtcggctctgaaccgagcaaggccgaaaccgcgctactgaaaatgggcgtcaaagtcgtcgagcacgaagtcgtctcggagcatcccggcaaagtcgccgtcaccatgcccgcggacggtgagccggtgcgcgacaccgacgacggcatccatatcggagtcgggatcacaggtgacggcatacccgtcgaaatcgccggaatggacaaggacgaggcgaaaacaaagctccagcaacagggcttcgacgtcacgctcaagccgcgtttctccagccgaaagaatctcggcaagatcgtccgagccgatcccggcatcggcgtgcggaccagcgagaccaacgtgaccctgtattacggcgtggatgccagcaaacgctacgacgtggtcggcacgtccattcccgacaggggatcggacaagatcatgacgaacaccgtggctctggcagggaagtattgcaccgatggcggcaactgcctgacattggaacccggtcagaccgatccaaacccgagtggtctggtgctcgacggcaaaggttcctcggatttcttcgaccagctgaccctctgcacgtattcgcaggacatcagcggctgcaacccgtcctccggcggctactacaacgcaatgaaggacttcctgattcagggcgataccggcgccatggagctgtacgcaggcttcggactgcccgtatgcggcaccacgtcttacgtgggcgacgggccgacatactgtgacggcacatcggagaaacaagtcgaggatggctcggatggaaccgccgaacaggccatgagcgaaaaaaatctcaaatacgtggctcgtgatttcttcgtggtgatgccggtcggagccgacctcgaccagctggaatccaacggatatttcgacggctcgactacatacaagccctatgcggaccgcccgtatctcatccgccgcgaaaactccgcatacccggaaatcaaggcgacgaatgacgccttccaccggaagcccaacccgtacgcgcccggcaccaacatgcagccgttcaagaaggcgcccaacgcccacaacgtgtactatctggtcgagcagccggtcgatttcagccagttcaaggaggccaccgtatccggcgggcggcagggagacggctccgactcgtcgcctgacgacggcacctcttccgacggcaacggcgatgataccactgaatccgatgactcatcgcaatcccagtcatcgcaatccggtgcgagaacctacacgaacgcgcggttctcgtaccgtgtcgacgtgcctgccggttacaagtggcagcaggagtccgacaacggcgacggtcgcaagttcgacgcgacgtccggctccacgcagatcagcgtgtggggcagcaacaacgcgctgtctcactccccgcaggaggagctcgactggctcaaggagaatctcggcggcaacgcgaacatatcgctcgcgcaggtggccggccaatcggtgtacctcagctatgagcagaacggaaccatcacgtatatccgcgaagtcgtcaccggagggaagatcgcggccatcgaaatcacgtatccgaccagcgaacgctcgagcggagacaaactcgcggagacggttccgctgaccttgaagttcgtggggtgatggggctatcgtcaccagatgcgaggccgtacgaaaccgttgtgttccaagaacgcggcgacgtcacgcagctccggcatgttgatgctgtgcgtcatgccggggtagattttctcggtgagcgtggtgtgcgaggcatagaacgcgttcatcgcgtcgagttcggacttggggaagatgtcgtccgcagagccgtggccgtagaacattggcggcttcagtcgcgcaagctcgtcgtcgccaggcaactcgccatgtgcgaggaagccggagaaactgactgcggcggcgtaccgtttcgggttgacgcgcagcatctcgccggcgagtagaccgccttgggagaagcccatgaccacgatggggtgctccggggcgatgctgtcggccacccatgcgtcgatggcctcgccggcttggcgtgattgccgatcgagcgattcgccggtcgggacgccttcgtaatcccatgagccgaaccacgtgtagcccgggccgtacgaaatcggcgcacgcaacgacgcgtaatcggcgccgggcgcacaataatccagcaatcccggcaggtcatgctcgttcgacccccagccgtgcagcagcaagaacaccgggccgcttccattggccggcagactggccaccgcatgttcgatcctcatcgcgctcactcccctcttgtgtgttcgtgttttgcgttcgccaccggcttcagagcggccgacgaatcacgtttcaatgtcatgttccgtcacccatggtagttgcacgggcgccggcagtcacaccatcgcgcatccaccccccactccatttcatcatctcatcccgccaaagtcccatctcaaggtcgtcacatgggactttcgccggatgaggcaaaaggcacctttccccaccacacacaagatgcatcacacgcccttcgtcctgcgaaagtcccatttcgtagcctgcaaatgggactttcgccggatgaggggtcacgccgcggcacggacatccgctcatagtcccgcgggaaaagtcagccaatgggactacgcgcggaatggaggctgcgggattgcatggcgtaccatataactcgacatcgaatccggcgccgcaacaccggcatccaccgacgacacgggagtatcaatgcaacaaccgatcatgacctccgtcgcttttctgtcgcaggcatcggcccctgccgacccgtcgaacgacgaggaccgcgccaccgcgaccgacctgcgtgacacgctggcggcgcatcgcggcgaatgtgtgggcatggccgcgaacatgataggcgtggcaaagcggatcatcgtgttccaagacaaggaaaacaaccgcaacgcaatcatgttcaacccgcgcatcattgctgggagcgacccattcgataccgccgaaggatgtctgtcactggatggcgaacgtccgacaacacgctaccagagcatcaccgtcacctatcaggctcgcagcgggcgcgaatacacgactgccttcgacggattcaccgcgcaaatcatccaacacgaaatcgatcacgtcaacggcatcatcatctgacgaataatgacggtcatcgcgtcatatcgccgaaatcgacaatgtgacgcgtcacaaagcacaccacacactcagcccaactggtccttgatgccggacggcagatgcgtggtgacttcctgctgaatgcggtcaaacgcgctggacagcagcagattacccggaaccgtactgatcaggaatgccagaatcgcggcgatgaccgccgtcaccagacctttgacaagatgggcgacgatcttgaacaccagataggcgacaatcgcgccgacgacgacggtgatcgcggtttgagccagctgcggcagattgccataccacaggacgaactggtcgaatccggaccgcacggtctgtgatgtttgagagatctgcgagttttgagcaatatgcaaggacaacacggcgtacacgaactgcatgtgcgaggtcagtctcctttgccggtgagtatggtggttgtttgatgatatcagcctgatcaggcctcccgtcatgtgccggtccccgatcgggccgggatgcgggaggtcccctatgtcgtcatgacgtcagccgacgaggaagtcgaggacgttcatgccggtgccggtctgcgcgcgatacaactcggtgtatccgcactggcggcaggagatggtgacgaacttcttgttctgcacgttgaacagtttggcgaaatcgccgccggtcgcctggaactggtcgctgtcgtatgaccggcatccgcatttaacgcaaacgtactgaatctgctgcataatgaattcctttcatcggaacctaacatcccccgatagtggttcaccctatcagacaggattcgcccgattgccggttatcccgtatccgcacgtaacgcgcatacaatcaacagaatcgtccgcgctccttcgcgatgcgggcgccccatatcggcatcagtgcgcatcggagaagaaatcacgctgaaaaacgccaacagccgacaaatccagaggctatcttcgtttcgaggggttgattcggatgcgtcaaaacatctatctgcgtttcgagggggtggtgctcaagtataaacgctcccaaaaccgcatgattccagcaacatacagcttcgaataccctgcatatcgtgttttggcaaccccttgaaacgcagatagatgttcggagagccccgaatcaaccccccaaagttcatataccgtacaaatcggcgggtcggatgtcctcagtagccgtgcgcgtgcagataatcgtcgtcaaaaccgaaataatggccgagctcatgcagcactgtcttgcgaatctgccggcgcaggtcgtcgcgcgtggcgcagacgcgctcgtgcgggcccttgtatatggtgatgatatcgggcatgacgccactgtatccggtgaagcgccgcgtgattggcacaccttcgtacaggccgagcagctcatcgcactggcgctgcatcgtcgcccgctcacgctcgttcggctcgtcggcgaccgcgataccgacattgtccagcgcgcgtttgaaccggtccggaagactgtcgatggccgtttcgacctcgtgctcgaactcctcgtcgctgatgcgcattccacagccttccttgtcattgaacagtcgccttgcccgccacgatcaggcggatgccccggcacaatcgggagcagtctgactccatgttccaagcataggacggcgtggaccgatgcgccacatagaccgtacgtcacacgaccggtatacgcttcagtcattcgtaacgtacactagtgactgtgcgaaaggaggtgcgcattggcgacgtcggaaatcgaacagttgtggatcagccagtttcaggagaatctgggggcgcttcgcaaagtggcgggatggaccacccagcagttggccaacgagctaggagtcgcacggcagaccatctccaatctggagaccggccgaagtcccatgaccaaattgcagtacctcgccctgcgcaccgtgttcagcgccgaaatcgccgaatgcggcaaccgcgaactggcgaagatcatcaagacccttgttgacgatccgattgaactgcgcatcaaggagcttgggacggccggttcgtccgacgatgccaaagagccgaccgatgagacggccgacaataccaaagcaaacagcgctaccgagcctgacgctcccagcgaagcagacgatgcacgaccggtcgcaccggcatccaagccggctgccggcagacgggcacgcaaaaacaaggaacgaccgctgagcacggccatgcaggcacttgccgtcatcaccgcggctctggccagcggcaccgccgccggcgttctcacctatctgctgtttcccaacggcaagcccggcaaaaacggcagacgttgacagagcggaccgcgctgcagaccgcaacaaggccgatcatcgacagtcgtactgattcggcatgacgattcgtgtctatttccgctgccacgaacaatgcctcatctcgatcaacttccggaaaagtccgggattctcttcgcgcatcagcgcggctgcgactgcatcatgtggcggcgcgtttgaacagagaaatataaatctcccggcatatgaaggcaaggctcttcatgcaccgggagatttgacgattcgttacggcagaaaaaacgttacaggcctaggacttcatgcttcttcatgtcgaactcctcttgggagaggatgccgatgtcgacgagttccttgagcttcttcaacgtttccacctgttctgcgacgctcatggaggcggcgtgcgagggcgctgccgcgccggctccggaggttgccgtatcggcaccgcccgtgctttcggctgcaagtgcggtttgaggctgcggctgctgcggttgcggttgcgcggccatcggcatcggcgctgccggcgccgcggtcatcggattgatggcctgagccatgttcatgccgaggagcatgccgccgccatcaccgaaaccgttgttctggatgccttgggcgatctgctgctgcgcggccatgttgccggccgtctgcgagacgccctcgtacgcagagacattcatcttgttcgaagcgaattggcgcacgagctggcgagactcctcatcgaactcgatgctctcgatgccgacgccggacacctcgaatccgaagcgattcctccacgtccccgcattcgtctcatcgttgcgcacgcgtgtggcgatatcgttcgcatgggcaggcagctgcgaaattcgatactgatcggacaacgagttgatggcgacgatgaacgactggacgaattcggaaagaatctgttccctagccttgggattgtcgaacgcgtacgacgttacgttggcgggaacgtaattgcgcacgaagcgaaccgggtcggtgactttcagtgacatcgtgccccgcgcccgtatctccaaatccacgccatagaatttgtcattgtagaccagcggcgctggagtgccgaacttaatgccgcggatctcacgcaggttgacgaacgccacatacttcgtctccaccggctgcccgccgaatgtgaatcgactggcgaccgagctgaacagcgatccgatgccgtcaccggcgagcacgcttttctcgccgtcgcggtactcgtaaccgcccggctcggtaatcacgttctcgatgccggattcagagaagatgaaggccgccgtgttttcgggcacataaatgtgggaaccgttgctgatgacgccttcggaaccgtactcgttcgacccgcgtccgttgttcgcgcctcttgggactcccggtgcgaccactacatactcgtcgaaccgaccggcagtgatgatgtctttccatagatccgcgaacgttccgccgagcgcgcccgcgaacgccttgatgattgccatgtgctttctcctcgtcttctcgcgcaagcgcggatgcgccgccatgcgtgttgcctgcatgacggcgcatccgcccagcgcacaggttcggtcggttagttcagctgcgtctcgcgattgcagtattcgcagcgaaccgcctcgcgcttatggccggacagcggcgcgccgcatccctcacaggttcccgacgaccgcgtctcggcgatgccaagcccgttgcgaaacgcgccgaacgtgtccttcaacgtaccggccagcgcctccgtgccgggtatggccttgctgaacgcctgttgcttgttttggatctgatcgagaaaacccattgctgtccttcttccttatgtggattggcggagtgccgaataccgcgtcactggctgacggacgcaagtttctgcgtgcatcgagccatgacctcgttgtagtacgcgagatcgctggcgctgagcgagccggaatcgatggaaaattacttgaattactcgcagatgtatcagagcttgtgctgatatctgatgtagatgaatcatcaggaccgcgcaggcttatcgacatgatgtccttattcgactcatcatgtgaaatacttacggaatagccatccttggtctcacctctaaaccatccgcccctgcgtctgtaatctacagtgaagcccttctcaagaacagcatcattatacgcggcatactgttcatcattggtatcacacacatcaatagagagcatgtcatcatgttcaatgagattgccaccagtcgtagatttcggggttggaagtttggtgccaatattggtttttggccaagagaaagcttcgcgctcaatttccggtgcggcggccggcgcggccttttcgagagctccggagacaacaatgcctacactgccaatgacaaaacccaacactgtaagtactgcggcaatccaagcaaacagctgaccagtcaccttgccgccgggacgtgttacatacaacgcagcaaatgtcagcaacaaggatatgaacgccatggcgaacaacattccccattccaatgtcgccggcgcgaacgtgctcagcaccatcaggatgctgtatacaagtgctgcaatggcgagtttagagcggttaccggaagcgccggtgaaccgaggattattcaaaatcttccaggccttgttctccttcttcggggcattcgccgcatcggcgggtgccgctgtgggcagagcaagtgccggatcaagaacagacaggaattcagcggtccgagtgccaccatcatcaccggtcacgtccagtttgatggccgtcccgtcagcaccctgagcgctggccttcagcgtgaattgtgctccgtcatatgcgtggaatgtcaccgttccctcagcgacgttctcttcatccacggtgaacgtggcgctggtggacagctgatcgtggacggcctgcattacctgctgcagactggtcgcatacacacgatcgttgtacgacggagtctgggcgggaacatcttgaactggcggcattgtctgcgtcggcggcacagactgttcggtcggaggaatgaattgggtgggcgcatcattgctgcccgaagtcgttggctgattgccgccggcggggaagggtgccggctgttgactatcgtttgtcatgattttcttcttcctctttctttgccagcgacatcgccagcgcgcaaacggcgagacatgtgagcatgaccgccagtccgacctcgatggcaaaccggctgcgttcgttcattgtcacatccttctctcgtcagccacttgatgtcgctgtactcctcaattagtgtatgtcactgtgaatatgtacgcaaattagcattatgtaataagtttagctagtcaaactgagttgaatccaccctttccgccacgtgcccttacggcagtggcaacgtcaattttcaggatggcgacatggccccgcatcagttgccaactgaatttttctccggcgtttcgccgggcgagtctcgctacgctgaaacatcagaatcacacgacatagcaagaggagcgcaacatggcagacacccccgaagagcatctgaccgaagagctgcttgaccggctgcttcacagtgccaagatcgaaacgtatctcgacgaggagcacatcacagatcgtgcgttgcccgattatctgaacgaactgctcgacagaagcggaatcaagcgcaaccctctcgcagaaaaaacaggcatgaatcagacgttcatctacgatattttcgccggcaaatcccggccgggaaggaacaacgccatcagactcgcgttcgggcttgggtgcgacctgcgcgagacccagcggctgctgcggcttgccggcgtgagcgagctctactgcaagcagcggcgcgacgcaatcatcatctggtgcattcagaacggccgggaccttcccgctaccgacgatgaactgtatcggatgggcgaggataccttggtgccgaaggactagtgcggggaggtagccggcgacgcccccacccgcttcgcgggagcccccgccagcgggggcgagattcttagcacatcactcgtgcgcttgtctccgccagcgggggcggaatcttaggccatggagcatgtcgatcgggaacgggttaggatagcgggtaacgaccaggactggggagcaagatggacgataagcagaccgcgcacgcgatggggatcgacgacacctaccgcgtcgagcgcacgctcgctcgcggtcagggcggcgtcaccgaactggtcagcatcgacggcatcggtccgttcgtgcgcaagaagatcccatcccagctggcccaacgcaacgtatgggcggctctcagcgcctgcacgaacccacgcctgccacacgtcgaggcaacatacgagttgcccgatcatttcgtggtggtgtatgactacgtatcggggcggcctctggagcacgtcgttcagcaacaggaaaaacttcctgagcgcacggcgacacaactgatctgccaactgtgcgatgccgtgaccgagctgcaccggcatggcatcatccatcgggacatcaccccatccaacgtgattgtcgccgacgacggagcgcatctgatcgacttcggcatcgccaggaccgtcgcagcgaatgcgacgcacgacaccaaggcattgggcacctacggcttcgcttccccagagcagttcgggttcacacagaccgacgcccgatcggacgtgtactcgctgggacggctgcttggatacatgctgaccggcgtctaccctgacgacaagcgatacggccagctgctcgctgacccccatgtggtgccatcccagctgaagtcggtcatcgaccgggcatgctcattcgaaccgagcgcccgtattcaaagcgccgacgaactgcgccgcgcgatactgggacagcctgcacagcaaaatgagaacatcgccaggcccgccatcgtgaacgtcgcgccgcaatcggcccggaagcgctccaagcgcaaggcgattatcatcggtgccatctctgcgattctgatcgccacgctcatagccggcatgctggttctcggtaatgtgttcaaaaccggcaaacagtccacgccgaacagcagcactacgtcatcatctcacagcaatacgtcagacgcacaacagccgggcaaggatggcacgaacgacagcaatcagttcaacggctccgcgaacgggcagacaacggatggaaacagcactgacaatacgcagagcgatacaacggagaacccgctgaaaatcacggaatcagggtggtcggcggacagtgccggctatatccattatgccgtcgcggtaaagaacaccagtagcaccttgcaggtcgagtttcctgcgattagcatcaccgggcgcgcgaaagacggctcgatactgttcgctgaggataacctcagggcagtatcgttcccgaagcagaccatatatcttgtcggacaagctggcaatggccccggaagcgaaactccggaaagtgtggaattctccataaaccaacgtggcggcaccgatatccggcaatcgcatggtgtcgtcaccttcacaacgtcaaatctctcggtgtcgcatgatagttttagcaataccttattcaatggagagatcaaagccaaaaacaccggctacgattccattctaaatggggcgtatgtgacagtcgtgctacgcaacaagaaaggcgacatcatctacggggatggccagcctatcgattcgatttttgacagaaaaacgcattccttctcaatccctatagacgattgtcccgattatgcctcgtatgagattcatgcgtcaatttgatttttgatttgccggaaattcgacgccgcccattgcgtatcacggtcatctcaccactatgccgcttgccgctccggcgatgtaatcggagcggcaagcggctacgcaacaatacaggtggcccgaattatcctcagccgcggttgtcgaacatcgacaggagcatcttgctgggttcgacggcgtagacggtgtgcggcaggcgggcgctcaggtagacgacgccgccgggtacgagttcgacctcgcggccttcgccgccgacgcgcagtttgccctcaagcacctgaatggtcaccggcatggcggccgtatgctcgctcagcgcctgatccttgtcgaaaccgaacagcacgacacgcaggccgtcctcacgcatcaccacacgcgagacggtggattccggctggatctcgatcagcgatgcaagatcggccacatagcccaggtgtggttccgtggaaatggcgtggccttcggcatcgtgcttgcacgcgcagtgcttgggctgctcatcaccggcttcctcagcatcaccgtgcttgcacttgcaatggtgcgcttcgccttcgccggcttccgcggcgccgtcgtgcttgcacgcgcaatggtgggcggccggctgctgagcggccgaagcgttctctgcggctgcctcggccgcggccctgcgctgacggcacttgcagtgctgctcgtcacgtcccgcctcacatgcggactgctgttcgttctcatctgccatgatgttctccttcgttacgttgccgtatctttttgttgcgcgttcgcgccgcatattgctgcgcggacgcgcatccacgtatatcagtgcatatcaatgtcggacgccgtaccgggcatcgaaccgcggctgatcttccgacaacatccaccatcattatctgccagcacggccgccggcggaatcatccgcccggctgtcggccggcgcatcgtcacttcgcgggcttgcgcaccacgaacgcaatgccgttgagctccttgctgtacttgtggaacgtggatttcatgttcatcacgcgggcgcggatgtccttgttccccaacatattacgcaggatgcgcagcacgccgccaagcccctcatcggcgagattgcggcgcatatccagcagcgccatcggctccttgccgctccacagcacttcaaagccctcggattccagcagctcgcgccactctttctcggtgagaggacgggcgttgaccttgatgctgcgggcgagtgccttgcgcacctcgtccttgaccggctcaggcagatcgtccggctgcagcccaagctcgtgaatcgaataggtgccgccagcgcgcagcagacggtaggcttctgcgatgatggcccgcttgccgcgctcagtctgcatggtgagcatcgcctcaccgatcacggcgtcggcgctttcggattccaaccccgtgtctgctgcgtcgtgcagagcgcagctcgtcggaatggacggtgcattctcggccgtcagcttggtgatgatgtccaccacctgcgggtcgcggtcgacgccgcgatagcttttcggcttgcgctcaagaatgagctgcgtggtacggccaaggccgggcgcgaattcgacgacgtccttgccttccaactcggttttcgccagcatgcgcccggtcagcttcttgccgccagggcgcagaacgcgcttaccgatgcgggcgagcagccagtgtccctgcagatgctccacatcacgatctgactgaggcagcggaaggctaccgttcccctgcgcattggtcgtggattgtggcgctgtattcgtagtctgagttcccatatcacgcgacactatcggcgatgcgccccatgcacaagggttttcggtcttttatcagcgtaatgtgattgaactcactccgaccggcggaatcggccgagcagcatttccgacatgccgacggctacgtcttgtgtgaagaaccggtcatacaggcactcgtcagtgagccatcctgttgacaatatgccacaatgaaaccagtgcgacgatgcgcggcagatcattcaccagtcacgtcatccgcgcaccgcacgacaacaatcggagacaatcgaggacaggaagaatgagagttatcagcaatattctgtggattatcctaggcggtctgatcatcgccatcggctgggcgctgatcgggctcgtgctgtgcgtgacgatcatcggcattccgctgggcctccaggcattcaagatggcagggctcactctgacgccgttcggcaaaaccgtccgctacggtggcggtgtcggctcgacgctggccaacatcatctgggtcgtgctcgtcggcttttggatggcgctcagttacgtgggcgccggcctgctgaactgcatcacgatcatcggcatcccgttcggcatccaatcgttcaagatggcgaaactggcgctctggccgttcggcgcggacatcgtcagcctgtgagcgtccggctcgcaggcctcatacggcggtctgcctataccgttccttcctcaagataaaaaacggtcgagccgccgtcatcccattcgaccttctcctcgcgcctgtgcgtcaggccgcgacgcgtataaaaaccgacattgcagccggtgtcggtaaacaaatagtaccgccggacgccaacgcggcggaaccgttccagcagatcatcgaacaggaagccgcccactcccccgccacggattcgctcgtcgaccaggaagagcgtcacctcggcgtcgtatcggttctttgcccctcgtatcagccgtctgtcgacacggttgatacgcagcatttcagcaatgccggagcgacctgcggtcgaaaacagcaacgggaacaatgccctgatgatatgacgatggtgccggttcggcaggaggcacaatcgtttcggaacattgatgtcgacccgcgccaatatcacgcccaccggccggccgtgcagcaccgcgacggtcgcctcggaagagcgcgccagacatgaatggaagtccgcctccgccagccgacgggaacaatcgccgtccgcttcttggccgcctgaccattcgccgtaccatgtacgccgcagaatctcgatcagcgcaggataatcgtcgcgccgcagggtgcgcagacgcactgcggggcgacgcggggtcgctgctgtcgatgacgatgctgtcgaaaccgcggcgaccgaggtcacatccgcaatcgtgctcgaggaatcgttcataccgcaatggtgacgtggcaccgagacgttgacggagcaaggtgagacacggcgaggcgggacggacggaaacgcagcacaacgactctcctgccgagacacgcctggatgtatcacaaagccgtcagagccaatcgccaagaatgacggaacagagccccgttctttcaaaagtcacacgacaagcttgcgactacgcctccgtaaaggtcatcgatgccctaatccgacgcagcggatacggaaacagagaaatcgaccgtctctgcgatggaacgatcacatacggacgcatccgagacattcgcaatggccttgaggctcctgtgcgtttgcctgagtttctgcaggcgcggtgatctcgacttcgcggcgcatgaggatgggcataagtacgatggcgatgaagacgatccggcgtaaagccggatgtggtgccgtgcggggcttcgtccttcatgtctaatcgcgattaaattgatattaattatgccatcggctacttctatttgacctatttctcgtcttatcttatagtttctacaactaaaagcctaatccggaaagagaggcggaacaacgggcatgaaatataggagtttggcgcggtcgttccatgccgacaggtccaatgacgccttcaacaaccatgcgaagcttgcccggcaacggctcgaggcggactccacattcaggaccggggtcgtcacccctctgggcgaactgttcgccgccacaccacgcgagacatccatgctcacggaaaagatacttctcgcggaacggcgggtatcccggctctggaaccaaatccctggcgtcatgcgctgggactacatacggcactccatcagcgaggaattgttcgccaccaacgagatggaaggcgtacgcagcacccgcaaggaaacccaggaagccgtggaagcggccgacaaggcgaggaaggacggcgacgaccccaaggctcggttcagcgaattcgccaagctgtacctgaacctcaccgacaaggactccgcactgccggcgggaatcgccgacatccgcgacatctacgacaaggtcgtgctcgacgaaatcaacgagagcgacaagccggacggcgaactgttccggaaaggcgacatggaaatacaaggcccgcacggcctcgcgatccacaatggagtcaaaggcgaaggcaacatcggcgcactcctcaccgacatgatccatctcgcgacctccgacgagattccccggctgcagtcggccatcatgtcgcatttcctgttcgaatacgtccacccgttctacgacggcaacggcagaaccggccggtatctcctggccctgtacctgaaccacgacctaaccatgcccaccgtgctgtcgttgtcccgcaccatcgcggagaacaagaacgcctactacaaggcattcatggaggcggaggacaagctgaactgtggcgaactcacgctcttcgtgaacaccatcctcggattcatccggaaggcccaggacgagctgatcgacgaactcgaagttagagtcgaccagctcgacaagggccgggcggtctgcgaccagctcgaacggaagcacggtctgtccgcgaaggcggtctcgatactatatggcgtgatccaggaggagatgttcgactcgaccaagtccatgacgctgaacgatgccgcataccatatcagactatccaagcaaagcgcgagaaagtacgtgggagagctcatggacgcgggcctcgccatccaatccgggaagcgcccactgaaaatacgggcatcggaatcgttgaagggcatccttgaggccggaatgggcgaggacgccggagagcatggcggcaaaacccaacaagaagaaacagaaaccgcccacgagggcgatcccgcataactcaactatccggaaattccggatagttgagttatcatcaaacatcgcggccggatggatggtcaaggtttatccgctgcgtgaaacgtcgagtgagacgtgtttctcgcggcggaactcccacgtcccgtccgcgcgatggacgatgccgccagatcccttcgtacgtcgtctgccattggccgccatgatattcctccctgtcgggagcgccttcgggcatctgccgcaagcgccctcccaagggcactctattggcactctatccgggccacaaacggccagatacgtggcaaaaacggccattccccagtaatcgaaaaacggcggaatccgcacgtgtccggagaccggaaacgttgatattccgccgtttttcagggctgcaaccccctacttgctcacgttgaacttgaactcgacgatgtcgccgtcctgcatgacgtagtcgcgtccctcctggcggagcttgccttcctccttgatcttgaccatggagccttcggcggccacgaagtcgtcgtaggagacgatgtcggccttgatgaagcccctttcaaaatcggtgtggatgacgccggccgcctgcggggcggtccagcccttgtggatttgccaggcgcgcacctccttgactccagcggtcaggaaggtctgcaggccgaggatgtcgaagccgacgcgggcgagctggtcgagaccggattcggacagcccggcgtcctccagcatctcgcgggcgtccgcctcgtcgaggtcggtcaggtcggattcgaactgggcgttgaggaacacggccggcgccggcgccacggatgcggcgagcttggcctgcaactccttgttggcgagctcgttatcgtccacgttgaacacgtagatgaacggcttggcggtcatcaggtgcaggtcgtagatgtcgtccttgttgatcttgcctgcggcggcggcatggtcgatggtctcgccggcttcaaggatctccttggccttcttgaccgcgtccatgtacgcctgctcgatcttcttgccgcgcaggtccttttcgagcttcggcagcgcgttctcgatggtctgcatgtcggcgaggatcagctcggtgttgatcgtgtcgatgtcgtcggccggatccaccttgccgttgacatgcacgatgtcgtcgtcctcgaacgcgcgcacgacctcgcagatcgcgtcggcctcgcggatgttggccaggaacttgttgcccaggccttcgccttcggaggcgcccttgacgataccggcgatgtcgacgaaggtgacggtcgcgggcacgatcttctcggtgtgcaccagctcggcgagcacgggaaggcgcttgtccggcagcggaacgatgccggtgttcggctcgatggtggcgaacgggtagttttcggcgaggacattattgcgcgtcagcgcgttgaacatggtggacttgccgacattcggcaggccaacgattccgatagttagagacatagtatccagtattggtgtcaaggtggacgttggccgcgccgatgacgcaattcgttgcagcgaatcgttctcaataacaaaagtgcgagtctcacgctcagcaaaacgaacatgaacaccgtatattgcccggaatataagggttctggacaatgtgcggttgagtggttttgttcgttttcctcacacgtttcttattgagaacgattcgctgcgattgacagacagcaaaaacgtcacagctcggccgcgccgatgcgccgcactgcctcgcgcagcagcgattcgtccttcagcaggctgagccgcacccaatccttgccgacgcggccgaagcacgtgcccggcagcccggccacctgcgccacgtcaagcaacgcgtcggcgaaacgttgcccgctccacccctcaggcgccttgaaccacacgtagataccgccgacggagtcgaacacgtcgaatccgagcgagcgcagtcccccggtgacgatctcgcgccgcccggcataccgccgggccagttcgtcgacgcacgactggtcgctgttcagtgccacggcgccggcatcctggatcatgccggtgaccatcgaacccatctgataatggtattgcttgagccgtgcgaccacgtcccggtttccggcgacgaacccggccctccacccggccatcgcgtacatcttcgacagtgaatccacttcaacggacacgtcggacgcgcccggcaccgtcagcaagctgacctgctggtcgctcacgccgagtcccgtgtatgcgaagtcatgcacgatgaggaagccgtaccgcttggcgagctccaccgcgtgctcgaagaatgacgccggcgcctgcgcgcccgtggggttgttcggatagttgagtatcagcatgcgcagccggcgccacaccgattcatccaccgcgtccaggtcgggcagccagccgagttcggcgcgggcgggcagcagtatctcctccgccccgtgcatgacggacatacaatggtacgacggatagtaggggtcgacgaatgcgacggcgtcaccgcggtcgatcagaatcgcgaacagtccggcgagcccgtcgaccgcgccttccacggcgaacagctgggaacgccagtccagttcgacaccatgcacgttgcggtaccagttcgcggcggcctgcaggaacgccggcttaccatcgaacggcgtgtatcgcgcgttgagcgggtcgtcgaccgacgatttggcgacgtcgcggatgaattcggccgggtatgcgtcggggttgcccttcgccaggtcgatcacgtcggcgccggacgccacggctgcggcgaccttcacgtccatgtcggcgaacacgttcggcgggatgatctgggcgaccggcgcgaaccggggcgcccatactccatcgcgggtgtcgtcgtcttgtgcggcgctcattgcggtattgctcctttgggatgggggttatataggaacgggaaaagaggggacatgtggcaaggaccgccctccggcgttacgcgccatctcccgccagcgggaggtggcatgccgtcgccccgctggcgaaggactgtcggcgtagccgacttcgggcggtccggggaggaagcgaatctcagtgctgcagccgcttggcgagcaggttgcatatcagctggctgacgaacacgatgacgagaatgatcagtgtagccaccagcgtcacgtcgctctggaaccggttgtagccgcggatgatcgcgaggttacccaaaccacctccaccgaccacgccagccatggcggagaaggcgaccacgttgatgaacgacagcgccgacactcggatgatcggcacgcgcccttcgcgcaggtacacgcgccatatgatgtcgagcgtgcccaggccggatgccttggccgcttcgaccaggccggggtctatctccagcagcgcgttctcgacctgccgggcgtagaacggcacagtcgcgcccacgatcggcacgatcatcgcctcggtgccgatggaggtgccgacgatcactcgcgtcacgccgaccagcagggccatgaggatgatgaacgggatggatcgcacgatgttgacgatcttgtcgaggatgttgtagacgatcacgttctgcgtgagcccgccgcgtctggtaagcaacagcagcagaccgagcacaaggccgatcgcgtatccgatcaccgcgccgacgatcaccatgtacagagtctcgtaggtcgcgtcccagacctccggccagatcatcgacacattcggcagccatgtctccagcagatcattcattgtcgttctcctccacctcgttcacatgcaggtcggcgagcggcgtcgcgctcaccccgaccgtcgggaaatacgcgagcgccttgctgaccgcctcggccggaccatccagactgaccaggatcatgccgaccggcgtgccgtgaatcacgtccacgttgccgaacatgatgttgcctctcacgccgaaccgttcgcgtatgtcggccatcagcgtctcctccgcaccggagccgaccgagaacagcagatacacgctgccgctctcccgctccttgctgaacagcgggtgctcctggacgagcgtgatgcctttgttcatgttgccggacgtgtagatgaactcgcgggtcagttcgttggacgggtggtcgaacacgtcgaggatggacccgtcgtcgacgaccttgccgtggctcatgaccgccaggtcggtgcagatgtccttgacgacctgcatctggtgggtgatgagcacgatggtcaggccgagccgtgcattgaggtccttgagcagggcgaggatcgaccgggtggtgcgcgggtcgagcgcgctggtcgcctcgtcgcacagcagcacctccgggtcgccgatcagcgcacgcgcgatggcgacgcgctgctgctggccaccggaaagctgccgcggatacgccttggccttgtcggcgataccgacgagttccagcagatgcatggccatcgcgcgggcgtccttgcgggataccttctcgtggatgagcggcagggtgacattgtcaagcacggttctggatggcatcaggttgaagtgctggaagatcatcgcaatcttgcggcgcagcggtagcagccggccctcgccgagcgtgctgatggtggttccgttgaaggtcacggtgccgctggtcggacgctgcaggacgttcatcgtgcgcaccagcgtcgattttccggcgccggagaaaccgatgatgccgtatatggagcccttgttgatggtcagggacacgtcgtcgacggcgcggaagcggtttttgccgcggccgaattcgacggtgacgtggtcaagcgagatcagaggggcgccggcggcgacggaatccgaagcctccgccgctgcggctgcggttgcgttgacggttgcgtcgctcacgcggcctcacccgcccgacccgcagcaccatccgccccatcgacggcggacttgccggccgccgcgagcacggcgtcgaggatctccttctcgccggacagcacgaagtcctccatcaccgggctgaacggcagcggcgtgaaccgcgcgccgacgcgcagcaccggcccgcgcagataatcgaaatggttctcggccacgcgcgccgcgatctcgccgcccacgccgccgatcttgatggcctcgtgcgcgatgaccagatgaccggtcttcttcaccgacgcatagatggtcggcatgtcgagcggcgtgatggatcgcaggtcgatgacctccacgctcacgccgtattcgcgccgtgcaacatccgcggcagcgagcgccttggtgagcatcagaccgtaggagaccagcgtcacgtcggcgccttcgcgcacgacctgcgcacggctcaggtcgatgggcggcaggtcctcgggcacgtcgcccttgaccgggaacagtcccttgttctcgaagtagatgaccgggttaggatccttgatggccgccttgagcagctgcttgccgttggccggcgtcgagggcacgaccacgcggatgccggggatgttggtgaaccacgtctccagcgactgggaatgctgggcggcgccgtgcttcatcaggccgtcgggcgcgcgcagcaccagcgacatggtggcctgtccgccgaacatgtagtgcgccttggccatctggttgagcacctcgtccatggcgatgccgatgaaatccgcgaaatgcaggtcgatgaccggcttggcgccggcgatggccgcaccgacgcccgcgccgacgagcgccgtctcggagatcggcgtgtcaagcacgcgctcggggaattcgtccttcatgccggcgaactggccgaagatgccgccctgcttggcgatgtcctcgccgtagacgaacacacgttcgtcggctcgcatctcttcgaacatggcctcgcgagtcgcctcgccgaatgtgatgattcgctcactcatacaagttcacctcaccgctgaatacgtcgtccaaggcgtcctcggccttggggaatggactgtttaccgcaaattccagagcctgtgcgaacttctggtcgagccgctcctccgcggcgtcgaggtcgtcctgcgtgacgacgccttcgagcaggatcttgcgccggaaccggtcaatcgggtcgttgtagagtttccactcctcgacctcctcctgggaacggtacttctgcgggtcggtgatgaagtggccgtcgcgccggtaggtcttgcattccaggatggaggggccgtcgccgcggcgggcgcggtcgatgagcttggcggaggcgtctcgcacggattcgacgtcgttgccgtcgacggtgacaccggggatgccgtatccctgagcgcgttccgacaggtagtccacgttcttgatgtcgtcgaagcgggtggtggatgcccacgcgttgttctcgcacacgtagatgaccggcagtttccagctggcggcgaggttcacggcctcgtggaaggtgcctcggctagatgcgccgtcgccgaagaagcacacggccacgtcgctgccgtgccgctgcttgatggcgagcgccgcgccggtggcgatgttgaagccgccgccgaccacgccgttcgcgcccagcatgccgacgctgaagtctgcgagatgcatggagccgcccttgcccttgcagtatccggtggcgcggccgtagagctcggcgagcgaacggtcgacgcgggcgcctttggcgagggtgtggccgtggccgcggtgggtgctggtcacgtaatcgtggtgggtgaggttgctgcatacgccggtggcgacggcctcctcgccgatgtacaggtgggcgggtccgacgatctccttgccgatgtgcgccttgacggtttcctcgaaccggcggatcttgcgcatggtggtgtagaggtcaacggcctgctgcgtggtcaatggtgtgctcatgatgtgcgggctttcgtatgttccttggtttgtttcctgttggatgtgggcggcgcgtgggcccgtcccgacttgtgccgggccttgcgcgggaatcgtcgcggcatggccgtctcctgcatggtccgtctgacgacctgtgtggccgtccttcacggatgccatgccgggccatatggccgacctgccatgatgccggccggagggccgccgcggcgcggaccgtccccttggtccgcgccatcccgtccggctggcatcatgtcttctcggcgagcactccccttcagccgagatgcgtcgacgttccccgttcgcgtcgcttgtcgtgtgtgttgttatgttgcgtgctgcggttgcggcggcattcgccgcatgtcaccacagcggaatgacggcccccttgtacagcttgtcgatcagtttcttgacgtcgtcgctgcggtaggcgtccacgatcttcttgtaggtggcgttgtccttatccttggcgcgggagacgatgatgttgtagtacggcttggactgctcgttgaccggctcgatgtagatggcgtccgacttggggttgagtcccgcgtcgagggccatgaacacgttgatgacgctggctccgacgtcgggcagcgaacgggcggtctgcgaggcttccagctcggtgatcttcaggttcttcgggttggacacgatgtcgtccggcgtggggttcgtaccttccttgtagtcgagcttgatcaggccggcggactggagcagcagcaggccgcgggccgcgttgacggagtcgttggcgatggtgacttcggagccttccggaatgtcttcgaccttcttggccttgtcggagtacaggctgatcgggttgagcaccgtctcgccgactgcggcgagcgcgttgtcgtgcgtcttgttgaagtcgtccatgaggatgtagccctggtaggcgttgaggtcgatgtctcccttgtcgagcgcctcgttcggctggatgtagtcggagaacttcaccagttcgacgttgatgccctccttcttcaggttcgggatgacgacctgatcccagacctcgttgctgtcgccgaccacgccgaccttgacggtggtgccggagtctgccgagctgctgttcccgcacgccgtcagaccgccgacaagcgatgtgaccgccaataccgccgcagcgattctcctgatcttcatgtctcttcgttccccctggtatcgtgcttggtttgtgccgtgtgtttggatgctaagattgctgatcgtgcacattgatcttgtgcgcccgctgcgttccggcgggatgccggccgttttcgcgaacaatgttcagcgtaatgcgcgttttcacgcggttcttgcgattgcgtcgaacagggctatcgccgaaatctatatgccgctatcatgcgcgtatgccgcacggccggcgaatgcgcgcccgggcggcgcggaggccaccaccagtctcacatattgagacataaagccgtcatctcgtcggattcgccggcaaaatccagcgccgcaaccgaatcgcctcgaatggaccggtcccggcgacggtggcataatacacgcggaaaacatcagtcacggcgaaaccgtgcaagggagggaacatgatcatcaccaccgtatccggcgcatcaacggcgtccggcagtcctgccaacggcattctgctggcgatccacgcgggagccggcgaccggagcaaggatggcagcgcgcagaagaccgcgcaggccgagcgcgatctgcgtcgggcgctggacgccggctacgcgctgctcgagcagggcgcgcccgccgaggatgcggtatgcgccgcgattcatgtgatggaggatgcgccggagttcaacgccggtcggggcgcggcgctgaccagcgagggaaaggtgtcgatggacgcctgcctgatgaccggcgacggcgaggtcggctccgccgccggactgaccacggcccggcatccgatcgatgtggcccgggcggtcaaggagcgcgccaagcacacgatgttcgcgctgccgggcgaggacctgctgcgctcgtggggcatcgaattgcgcgatccgtcgtatttcgtgaccgaggaacgccggcgttcgctggcacgcgcccaatccgagggcgacgcctgggagaagcacggcacgatcggcgcggtggcgagggatgccgccggacatgtggcggcggggacgtccacgggcggcatcacgaaccagatgccggggcgcgtcggggattcgccgctgcccggatgcggcacgtacgcggccgatgacagcgtcgccgtgtcatgcacgggtatcggcgaggcgttcgtgaggtctgtcgcggcgcatcaaatcgcggatcgtgtgcggttcgccggccagtcagtgcaggaggccgctcaggccgcactggatgacgtggcggcccggcgcggcgacggcggcgtcatcgtcatgccggccagcggcgacggcgtcatcgcctacaacagcgagacgatgaactacggatacgtcaccgccgacggcgtccgcgtcgttcacggcgccgaataacaacagacggcctgcgccatccgacgacagctttccgtccatcccgcgaaagtcccatttgcggcgtgcgatatgggactttcgcgggatagggcaccggatgatatccggagctacaccgcggatgacgactggaagacgaccggatgacgaccgtccgatggacccttttgcagggtcagcctacgatggcgtcgacggcgtcgatgacggctccgcggaagccgtccttctccagcttggcgacgccgcggatcgtggtgccgccgggcgagcagacggcatccttcatcgctccgggatgggtcccggtggccatgtacagcgctcccacgccctcgaccatcttcgcggcgagccggtatgcggtggcccgctgcagtccgtactgcacgccggcgtcacccagcgcctcaatgtacatgtcagtgaaggcgggtgcgcagccggccaccaccatggcgatggtcatgtgtgcggcgtcgacgcgctcgatcagcgaaatcgggccgaacagcgattcgaagacctccgtctgcatgtcggtgagcgtgttgtcgatctcggtgacgagcacgcccttgccgacggccatcggcgtgttcggaatcgtgcactggatatggatgctctgagccagatcgccgaacagcttctggtacttcgccagatcccagccggcggcgatcgacaccacgaaccgtccattcttggcgaactcgtctgcgatgggcttgatgacggattcgatctgatacggcttgatggcgatgatcaccacgtcggccgcggcggcgacctcacgcacgttgtgcagtggacgcaccccgagcttcgcagtgctggcttccagcttgtcgtaatgcgccgcgcaggcgacgatgtcgccgccgttgacgacgcccgcatcgacgagaccctgcgcgatggcctgcgccatgttgccatagccgatgaatcctatggtgatgttctgcgccatgatgctccttgttgtgttgttcatacgaaagatgcagttcgtcatgccccgccgcgcacggccgcgaagcgtacgcccgcacgctagaacagcgattccaggtcgccgcggttgagggcctcgtcgtagagatggcggaacacgagatcgccgtgcagcccgtcatgctcgaactcgttggtgacccagtaatgcgagttgccgacacggctcagcgtgtcgagctgcatgccggaatccacgtacatgtcgtcgaaatacacggccgattgcagcggaacctcgttgcgggccagctggtcggcgtcatagatcacaccgaatctcgtatcctccatcagcaggtccatcgccggcttgaacggccgcagcgcggactcctgctcgaacatccacgggaacatcgcctcgccggtgaaggccagcgggcgttcgccggtcgagaaccggggcatggtgtcgcgcacgcgctgtgccgcccagcgaatcggctcgtccagttcaccgttcgcgtagatgaactcctgcagcggccagtacaggggacgcgaggaggtcgcgttcatgaccttcgccaagaactcgtcggataacgccgacccggctgagaccgaaccgtctccgtcgacgaacgcatcgtcgaaaatccagtgcacgcgctcgaagcttggcttcatgccgaagtcggagccgaggcattgcaggcgctccacggtcagcgggtcgccgttcggcagcagcggggttccctcgggcagcgagccggaatcgccaccgatgccgccggcttccgcgatctcagccacggtcggcagctgatccgcgacggcggcaacacgatcggcatcgacgccgtagcgctcgtaaaactgcgcggtcttgcgggccatgcgcgggaacgtgtgctcatagacctcggtcgcgttcgccgggacatgcgggatgccgccgcaggtgaagctcgcggccactccttcggggaacagcgacaggtaggtcagcgtcaggaatccgccatagctctggccaagcgtcacccacggagagccgccgaactcggtgcggcgcagatgttcgaagtcccgcacgatcgaatccgcgaggaaccgcttgaggtaatccgcttgcgcacgcgctcccccggcggcgagcctcgccatggcatgcgagtcgacgcgcgacgagcggcccgtgccgcgctgatccggcagcaccacacggaaatgcttgaccgcctccgcaatccatccgtcgctcgacgggttcagcagcctgggtccggcccctcccggaccaccctgcaggaacaccagcagaggcagatcgtcatgcacgtgctcgggggcggtcaccacgcggtagaacaggctgatcgattccccgtcaaagccgcgccccggctcatgaccggcccaatcaagcgggaccttgaccgaccgatcctcgatatgcagccccggcacgtaatattcggcaagcagcgtcatacattccctttcattgatgcaccccggcatcccacgatgccgtaccattctcggtaccactgtagccgaccggcggcggaaacccgaggggattcccaccaacgaaacgcaccccgcccgacacgccgcatcgcaatgaatcatccggccgaccgatgtgggtcgggtcaccgcacgcgatacgctgaaccgtatgggaatcatggaacgaatcaccacgtggaacaggaagcatgtgctgctcgcagatgccctgtatgcggtgatcatctccatctttttcacgctcatggccggtaccaatgacagcaatcccggcatcatcgcctatttcgaccatacggtaatggccttctggagcttcgttctgatggttcccgtcgcgatgcgccggtggaagccgcagatggctacattgctgttcgccggtctggtggtcgtccaactggcgttcgggccgtcgatggtatatgccgacctgatggcgccatggatgctgtattcagccatcgtatatgcggatccgcgcaattcgaaggcgttcatcgtactcgccgtcgccatcggggccttggcgtcgcccgtcatcatctggtccgccgatgcgggtcccatcctcaatcagggcgtgcccttcgatggactcagccccctggagacatgttcggggacatacatctatggtctgagcggtgattgcgccaccaccatagcgacaagctcagtggccatattcatcttcatcgccgtgtatctgttcgcggcgatcatcgtcgcgtactggcagcgggcccggcgcatcaccgtcagcatgatgcatgagcgcaacgacgccttgcaggcaaaagaggatgaggaacgccatatcgcggcgctcgccgaacgcgcccgcatcgcgcgtgacatgcatgacgtggtggcgcacacactgtcgatcatcatcatccaatccgacgggggccggtacgcgggcgccaacaatccggcgctggcccggcagaccatggagacgatccgtcatgaatcggagcgcgcgctgcacgacatgaaacgtctgctgggcgtgttcggagggtcggaccatgccgattacgcggatgtggacgcgctgatcgaccaggcgagggcggcggccggcatggggtgcacgattcgcaagaccgtgtccggccagccgcgggccgccgcgctcggcgcacaggcgagcaccgcaatgtaccgcatggtgcaggaggcgctgacgaacgtgcgcaaatacggcggcccgaacgtcaccgtgcagatcagcgagatctggggggctgacggacttcacgtcaccgttgccgacaatggccgcggcgcgtcatcgtcgttggacggccacaagcccggttacggactgatcggcatgcgcgagcgaatcggcgcggtcggcggcagcgtgaccagtggaccgcagcttggcggcggcttcgtggtgtccggcttcgtgccgtacagcactgtctcaacgcagtccgaggctgctgcgccggcgtccgaaagcccgaacgcggcgtcttccgctgcggtgtcttcgggcgcggcaatcatgccgatggcggccccgacgaccggaacggtttcaatggcgacggataccgggaataccggggtcgtcagtaatgtcgcgaacgccccgcaatccgccgtcgccagtcaagtcggtgtcgtccaaccggccggtgtcacgcaaccggccggcgcaaagatgccccgtccggtgtcgcagatgtcatcagtcccgacacaagcgccgccggcgcccatcaccatacgcctgcgcacgattctgtccgccctgcgttcgaagccgatccagcaggcatccgctaccggggagcagcggctcaactggatcgagcgcatgtcgcagtggaccgagcggcattatctgctgaccgacctgctgctcaccatactggtggcctggatgctactttccatcaatccatccgtcatatacgccgagggactgcagctcgacaaccgtttcgaccgcgcattgacgatcatcatcctgattccgttgatcttccgccgcaggttcccggaatccagcgcgctggcggtggccatcctcgccgcgcttcagctgctgttcttcgagccggtcagcctggccgatatcctcgcttcccttgtggccctgtattccgcggtgttgtacggccgtgacaaggcatggcgatggacggggatcgccgcaatatcggattccgtgctgttcggctgcaagatcttcgccgctcaaaccgggtatcgaagcatcttcagcatgctgactcatccccgcccggcatattccctcgcggcgacgcccgccgcgttcgcatcggcaatcatgttcatggtgatatcgctggcgttgtgcataagcgcgacggccatggcacaatgggaccgatccagcggatcgaacacgctggtgctgcaagcccgcgaggaggcgttgcgcgcggagcaggccaagcagcgcatcctggcggcgaacatggaacgtgaccgcatcagcgagagcatccagtccgaggtgacgatgacgctgaccagcgtgatcgaccaggcggtcgccggcctgcgcatacttgacgattgcgagcgtcacggcgaacagccgtcgcccggggccatctccgaggcgttcgcggccatcggatcacagggccgtgcggcgctggcccacatgcgcaagctgctgggcgtgctgcgcgagaccggattcagcgatgaggctcaccggcaagagcagcccggcatgcagctcaggcccgcggcatcgctcgacaagcagctgcacgatagccagctgcacggcatcgcgtcgtaatgagacggcgctccacggcctgccggggatcatccgacatgaattcagggttaaatcagggggcgtgatgcgggacttgttcgccgatgttggatacagtggaaggcatgagtgagttgcaaagaattcgggtggtcatcgccgacgatcaggaactggtgcgagcgggattcgcaatggtgatcggatcccagccggacatacaggtggtcgggcaggcgggcgatggcgcccaggcggtgtcgttggccgaatcgctgcaccccgatgtggtgctgatggacgtgcgcatgcccggcatggacggactggaagcgaccagccgcatcagcgcgctggaagcggccgccggagacgcgccgcgcaagacccgcgtgatcatcctgacgacgttcgacttggacgagtacgtgatggcggccatcaacgccggcgcatccggattcctgctcaaggacaccgagccggagacgctgctgagttctattcgcacggtatatcagggcaacgcgattatcgcgccttcggcgacgaagcgactcatcgaaaagatgatggaggacgggtacaccaagcatgggttgacggcgactgacggctatgcggacggttcgtccacgatgcccgtcgcccggccggtggcatacactgacccggagctgaacctgctgaccgagcgggagcgtgaggtgctggtggagatcgcccatggattgtcgaatcaggaaatcgccgacaagctgttcatcagcctgccaaccgcgaaaacgcacgtggcgcatatccttgccaagatcaatgcgcgcgaccgtgtccaggccgtcgtcttcgcctacgacaacggtctggtataaggcgaatataaaataaacgcccccgctggcgggggcgcgatgctcagtccgccagcgggggcgctagttgtcagatcgcgtgcttgcggcggatcatcatgatcgtgacgccggcggcggcgatcaggatgaacgccgaggcgatgccggacacgtccgcgccggtcttcgacagcggctgcgtgccggaggggttgcggccagcggcattgttgacaccggtgttgccggcattgctaccgccgttaccgttgccgccgttgccgccgttgttgccgttgttgccactcgtctcgcgcacgaccgaggcctgcgcctggccgggctcgaccttgacgacgttcttgccgtcggcgctcagcgtgaccttggcgctgtaggccgcggcgaggttgactcgcgcccagccctgcgacgaggcgtccagcggatagccggagtcgccttcggtcgcggcgagcacggccttcttctgcgcggaatccagcgacttgaacgcggcgacgttgtcgaacatgcggacggccgagtcaggcaccaccggcgcctgtccggtcgtgcccgtggcctggaagccataggtcatgcgggccttgtacgcggccagtgcggaggcacggtcggtaaccggcttggtcgaaacctcgtcggtgaaatcattgcggtagccgttggcggcgttcgcgccggtgttcgtgatgcaggcgtcgagcgtatcgccgtggttgtcggccttgcactgcgcggtcaggtaatcgacgagctcggcgcgggcggccgcgccttcctgtgcggtcttctcgccgctcaccgcggtggcgacgccgtactggccggcgatgtggccgcccatgatgtcgagcgggtagtgcacgccgagcacgatgcggttgttgccggcctcggacacgcgggtcatgatctccgggccgagctcgggcagcaggtacgccaggccggcgccctgcgtgaacgcgaaggtggtgtggccggacgggaacgagccggagttgtacagtccgtcatactcgttgtcgggcgcttcgccgtctccccagtcgaagttctcgtaaccggggaccttcttgatgttcagcgtctgcttcagaccgttcatgttcagcgtcgtgccgttgaagttcacgcggtccacgtaggggcgcgggtgctggtatgtggccttggcgacgccggtggaagcggacttgttcatgtcggacaggaactgggcggtcttcggcaacttaccagcgtcggcggcgtccttgtagtacttgccgagcaccggaccgagcgcgtcgtacagcgtgttggtggagttcatctgggcgtcggacagggcgcgctggtcctgcgcggtgttgccgtcggtgccgtacgccttgttgttgatgtcttcggtgagctggtcgtcgtgcgcgagcaccgacttgccctcatcggtcacgcccttgcctgcgacgtagtacttgttgaagtcggtcagcagtccggtgatcgtgttcttggaggatgcggtcttcaccacggtcggcgccttggcgccgaaggagatggcggtgatggtgctgccgtcttcgctcagcgtcaccttggcgctgaaagccttggcgaggttgatgcgctcgaatccgttggagctggcgtccagcgggtagccggagtcaatttcggaggcttcgagcacctgacgacgctgggcgtcggtcaggtcggggaatgcggtgagcagcaggttctccgcgccttgcggcacgacgggcgcctgaccggcggccgaggtctgcgagaatccgtaggtcatgcgtgcggtgtaggcgtcgatggcggacgcgcggtcggtcaccggttcggtggacaccgcgtcggtgaaggtgttcttgtatccgttcttgtcgttggcgccggtcttgctcacacacgcggcgacggtgtcgccgttgccgtcggccttgcagcgtgcggcgatgtagttctcaagttcgtcatgggccggcagcagcacgttctggcggaacgtggcatcagaccacagagcggtgacggatgcgctggcggagatgcgtccgccgatcacgtccatcgggtagtgcacgccgagcacgacgcggttgttgccgccttcggcggcgcgggccacgagttccggtccaagctcgggcagcagcgtggccaatcccagaccgcggttgtaggtcttggtggtgtggccggacgggaaggactgcgacggctcctgatagtcggtgtaatcctcgccgtattcctggccgtcgatattgatcatcgggatgcgcttgatgtcgagcgtcgagctcagaccgttgaggtcggtgtcaccgccgatcgtgcggtcgacgccttcgttctccttgttgaagtacggacgcgggtagttgaagtccttcttggcgctgccggtgccgacgaagcccgcgaacgagtccttgctgcttttgctgaacaccaggtcggaggtcttgggcagctcgccctgcgcgacgccctcggccacgtactggccgatgatcggcccgaacgcgtccttgtagatgcgcagtgcgtcgccgtcgctcgcgtcgagagcggcgcgctcggcctgcgtgtaggtgccgtcgaccttggtggtgtcggcggcggccttgttgttgatggccacgacggtcttgtcgttctgtccgagcacgctcttgccggcatcggtgaccttgccgcggaaggcatcgccctgcggcgtgttgttcacgaccttcttcggggtccaccagttgtaatactcgccgagcagcgaggtgatgttcggcttgaccgcactgccgtacgagggagtgtccgcggcgttcgcggtgacgctcacggacatcagcatcgcgatggatgcgatgcctgccacggcgcccttgaggaccgcggacttacgcattgtcttgtgcattctttcagcttccattgtgtgttggttgatatggaaccgattctgttgtagaccaactgtcaggttccgaccgctgaaagataatgaaaatcaccttcgattaatgaacagttcattttgcaacgtaccgattttttgcgtgttcaggttataacatcgcgcgtcgggagccgcgtgtcacgggtcgtgcggtataacgccatataggcgatgaggtcccttcttttgagtgaaagaagggacctcattgcactggcggctgtgttgaccacccaccggctctacgaactaggcttcagccagagcctcgacaggctgaaccgtcaaacagacagtccggtggactgtctgtaggtgaagtgagcggcttgccgcgaaggccgcctaagaggctcaggcttcagccagagcctcgacaggcggcgtcttgactgcgcgacgggccgggaacacgctggcgagcagggctgcgatggcggccaccacaagcacgatgccgttcatgccccattcgaaggggaacaccgtcttgccgtacaggctgaacaccatgtacgaccccagccatccgaacagcgtgccgagcaccacgccgaccacacctgcgacgagcgacagcagcagcgcctcgacggccagcgagcgccgcagctgcccgcgggtcatgccgatggcccgcaatgtcgcggattcgcgggtgcgttcaatcaccgacagactcagcgtgttcgccacgccgatcagcgcgatgagcaccgcgacggcgatcagcgcgaccagaagcatcagcatcgagttgatgatggtctcccattgtgcgcgttgcgccacgggaccggtgatggacacggtggagtcatacgaaaatacgtcctgaatcttgttgaacacgtcactcagggagacgccggccgactgggtatccacacgcatgagcagcatgtggctggtcgcggtgacgtcgccgttgttgaaatggctggtgttgatgaaggcgacggcatcatagttggacgagacgcggcggtaatcggattgcaccggcttgagacgcattgatgaggaaacacctccgttcgtcgagcttgcgctggcggacccgtcttgctcggtgcttgccgcaatgccattcgactccgcggcagtgaaccgcagcttcgcatcggagccgaatgtgatctccttgcctgaggtggcacggtatttcggcagcagcacggtgtcgtcgccgacggtgacgccgctcaggtcggcgtgcatgacgccggcgagttcggaggtgttcttgacgccgacgagcagcagggacatcgttcccccgttcacgccttccgcggtcaccgtcgccgtgggcgcgtacatggtggccgcgacgcccttgacctgggccgcttccttgactgcgctggtcttcaggccgtcgccggtggcgatcatgtcgacactgtaccgggacgcgagcgcctcccccatggtctgcttggcgctggctgcaccggtggcgatggtggcgaccagggtcacgccgatcagcagcgcggtgccggtggcggcgacgcgacgcgggttcttctggatgttggcgtgggcaactttggcgctcggaccgcacatcgagacgagcgcgccgacgccgcgcatcagcaccggcagccagaacgtggcggtgagtacgagcccgaggaacaccagcgcggccccgccgatggacatcagcagcacactgctgtaattgtcgccggccatggtgtccagaccgttcagcatgccggacagctgccatacggcgacgccagccagtgccaatccggcgatgatcgtcagaacgccaatcgcggcgcggacctttccggcgcgtgatgtatcggtcagctcgatcgggcgcagggcctcaagcggcgtcacgctggtggcggaccgtgcggagccgagcgaggcgagtacagtcatgatcaggccgaatgcgatcggaaccacgaacgcttgccacgagagaatcagcctggcctgcattcccatcatttccattacgcccgtgttcgtgaccagcgcgatcagaccgacgccgaagccgacgcccagcaccgacgcaatcaggccaagcaatccggcctccatcagtacggatgtgtacagctggcccttcttcgcgccgattgtgcgcagcaacgccagcgtgcgcctgcgttgcgccaccagcacctggaacgtgttggcgatgaccagggcggcaacgaacagtgcgagcacaccgaagctcagcaggaatatggtggggaagctggtgttgttcgagctgaggtccctgacggcctccgcctcgaccgatcggcgcgattccacgccataagatttcggcaggagcccggagacctcgtcgacggtccgctgcgcggcagcggcgtcggcttcgtcgatgtcaagcaggagcatgtacgcctgcatatggtcgaaatcatccacgccgtataccgcggcgacgacgttctccgacagcaccgaagcgccaccgtaaaacgagtacacaccaaacgggtcgctggtcaggccaacgacgcgcacgtcacgcaccgcggtgccgctcagagcgctgccgttggatatcggagcgacgtccaccttgtcgccgacacccactccaagttgtttggcgacggattttggcaacgccacctcgttgttgtcgaccggctggtcgccggagacgatgcggaccggcagcagcttacggtcggttgacgtgccgacggcgtatccgttcgagcgcttgcccgctgcggagatcgaaacgctgacggacgtgtcgacgcgggcgcccttcacgcctttcgtggcgcgtacccggtcgaggttgaaatcggcgacggtggttctgtcggccgagccgttttcggagaccgcgccgttgctgtttgttttcatcgtggcgatgtagttcgcttcgccgagctgggcggtcctctgcctgcgcagcgagtcgtccatggagttggagaacaggaacgtggcggcgatgaacgccgtgccgataaggatggctatgcctgcggggatgagcatcctcgcgctttttttcatgagtttgatggtgatggagaacatgagaagtccttaatgctgtgggcgggtcagcggcggtgctgggcgacggcggcgtgctgcggagcgcccggaacgcttggagcacccggaacgaaagacgccttttcggtgtgccccttgagggccgccaccggcggtcttggaacggtggtgcccgcggacggcccgccgaccagttgggtggcccgctcgcgctcgttcatcaacagttggttcatgctctcggcggtcgggcgctgctcgtcggcgacgatctggccgtcggcgaacacgatcgcacgatcggcataggatgcggcgacggcgtcatgggtgaccatgatgacggtctgcccaagttccttgacggatcgcttcaggaagctcagcacttcggcgctggagacggaatcgaggttgccggtgggctcgtcggcgaacaccagcgacggtttggtgatgagcgcacgcgcgatggcgacgcgctgctgctggccgccagacagttcattcggccggtgcgtgagacgttccttgagtcccagcgtcgtcgtcagcatgtcgaaccactgacggtcgggcttctgacccgccagagtcaacggcatgaggatgttctgctcggcggtgaacatcggcagcaggttgaagctctggaagatgaagccgatcttgtggcggcgcagcatagtcagctgattgtcgttcatggtggtgatgtcggcgccgtcgaacacgatatgaccgctcgtggccgagtcgagtccggcgagcgtgtgcatgagcgtggacttgccggagccggacgggcccatgatcgcggtgaacctcccttgctcgaaccgcacattgacgccgcgcagcgcatgcaccgcgttttcgccatgcccgtagtccttgaccaggtcgatcgcctcgatggcgatggggtgccgctgttcctgcgccgcaccggcattggtctgcggctgcatgatctgctgttccataacgtcctcttccatatcaatacagggattttccctgaacgttactttcaccatacggatggcgggctcggaccggcatcgtgcggcggggtgaatcgccatcgtgcccatcatccttgagtattacgcgctcgaacattgtgcgcggtttcactgcgctcggcggcctctctcggccgggaacgcacgggtccgtggcgatgacggggggatgataggggatgcctggcaagaagaattgtacgatgagcgagaacagtgttgagaacgagaatggcgaaacgtccattttccaatgattcttagatttgtcctcacgccccgaaacggcatgtaaccggttaaaaacgatttcgtggcacagggaatgccacgaaatgccgaaaacagcgatttttaccgtttcgtggcacgaaaccccctgcttgcatcacttttcaagacgaaaaatgccaaaatgtggtcggaacggagctgaacagcagaatcgaaccatacgccctcccgctggcgggaggtggcgcgaagcgccggagggtggttgtgcggcgacatcccacccgcttcactacagcccagccagcaagggctatatgcaacaaacccgcgctgcatgacgtcagcgcgggtttgtacgggttccccttctcgttccgcgtcacggttccccgaccggcgacgcggaaaatccttgcggctatctagccaagaccatcacttggccagtccggaggcgcgcagcgcctcgaagccgcccttgaggtcgtcgaggatgtcctcgatgttctcggtgccgatggacaggcggatggtgccctggtggatgccctgatcctccagctcctccagcgtctcctgggagtgcgtggtggaggccgggtggatgaccagcgacttcacgtcggccacgttcgccagcagagagaacaggtgcaggttgtcgatgaagacacgcgccgcgtccttgccgcccttgatgtcgaaggtgaagatggaaccggcgccgttcgggaagtacttcttgtacagctcgtggtcgcggcgcccctcgatggacgggtgcgagacggactcgacctcaggcacggtctgcaggtactcgacaaccttcagcgcgttctgcacgtggcgctcgacgcgcagcgacagggtctcggtgccctgcagcagcaggaacgcggcgaacggggacagggtggcaccggtgtcgcgcagcaggatggcgcggatgcgggtcacgaaggcggctccaccaagggcctcgtagaagttcagaccgtggtaggagggatccggctcggtcagggtcgggaacttgcccggcacctcagcccagttgaagttgccgccttccacgacgacaccacccagcgtggtgccgtggccgccgatgaacttggtcgcggactcgaccacgacgtcggcgccgtgctccagcgggcggaacaggtacggggtggcgaaggtattgtcgacgatcaccggcagatgatgcttgtgggcgattgcggagatggcctcgaagtcgggcaggtcggcgttcggattgccgaaggtctcgaagtagacgagcttggtgttctcctggatggcgtcctcgaagttctgcggaacctccggatcgacgaaagtggtggtgatgccgtcgcgcggcagcgtgtgcttgagcaggttgaaggtgccgccgtagatgttcttggaggagacgatgtggtcaccggactgggtgatgttgcgcacggcgtactcgacggccgcggcgcccgaggcgaccgcgatgccggcggtgccgccttcaagggcggcgatgcggtcctcgaacacgccctgggtggagttagtcagacggccgtagatgttacccgggtcggcgagtccgaagcgggcctcggcgtggtcgaagttgtggaagacgtagctggtggtcgcgtagatcggcactgcgcgggagtcggtggccgggtcggcctgctcctggccgacgtgcagctgcagggtttcaaaacggtacttcttgttggcttcggtcatggtggtcgctccttttcccatgtcgggatgctgtggtttccgtgtctttcttgtcgccacccgtcggcggtttccagcgtctggcgaggtgttggtttagaccatagggcacatggatgcggcatcgcaagtccggcgttatcgcggttgcctataaccctttaaaagccgttggcatcattggtgtcgcaggtcgtaacaggagccctaaaaccgactatccacgatgcgacacgccgctgccgtcagagccggttccacaggtcacggatcatgtcggtgatggtcaggtcgcgcagggataccatcttcgggaacgtgcggatcagacggcgctgctggcggttgagcgagcgacggaccagctcgccggcatccgcaaccggtctggatgccgcacgaatgccctgctgggctccggccgcgaaccggtcatacgcctgctccgcctgcccgcgcagtttggcggacgtttcgtgccactgctcgtcggcctcgctgatgcgtgtgtcgatctgtctgatctgctgcgatttgagcgccttgatgccctcgctgaccttcgccagacgcgagtcgagactgcgcagaccggcctgggtgatggccgcatcgattaccaccacgacgaacgacagtcccgcgacggcgtgaagcagccatatcggccaggaccggacgatgtcggacatccacggctggaccaccagtttgatgcacgtcgcccccgcgccgaacgccaggaacccgttgagatacacgcgcccgttgatgttgaacggcttgccggaataatcccagaaacgcatgtggtacagtttctcgatcgcccagctcgacgcatattccagcgtgcatgcgagcacgccgctggacaggaacagcgacagcggattgttcacgtcatgcagcagcacgacgaccagcagaccgccgaacccgtagatcgggcatatcggcccgttgagcatgccccgatcctcgaaccgcttgcgcagcacgacgctcaggccggtctcccacacccatcccgcgaacgagtacgccagccaatacaggaagaagcgttccacgacaatcagaacatccatgggcgtcatggcatcctccttgcgatcatgcggacggaaccgccgcatcgggcttcgtcccgtcgtcacgtgtatcagacaactctagcgcgaggcgtcacgttccggcttccgctcccatgccgtcgatacgatgcaggtggcacttcccggccgcccgccaccggtggcgcgctgggcgggaccgcgttacgcggtgtgcgcccgacgatgctagtctctgttgtgtatcgtcattgcctaccagtaaggggtgtttccgaatgaccgatgatgtgacgctgtatgaccgcgacccacattacattccgcgcgtggccgccgtgcacgacatgtgcgggtatggcaagtgctcgctgaccgcggcgatcccgatcctgtcggcggccggctgcgacgtgtgcccggtgccgacggccctgttctccgcacacaccaagtacgccgtgttcacgttccatgacacgacggacattctctccggatatctggatgcctggcgcaaggagaacgtcgaactggacggcgtgtacagcggcttcctcggctcccccgaccaggtgtccatcatccagcgcctgtaccgcgaatatccgtccgcgctgcggctggtcgacccggttatgggcgacgccgggcagatgtacccgacgtacacgccggaactgtgcgaggcgatgggggctctggcggacggcgcggacgtgctgatgccgaacctgaccgaagcgagcatcctgaccaagcgcgactaccccgggcaggatctcgatgacgccgccgtgaccgaactgctggacgcgctgctgggactcggtgccaagaacgtggtgctcaagggcatcgaccacggtgacggcaagatcatcaactacgtggcgagcgccgaaaagggcgctgccgagaaggtcgagcttgtgcacgacaagctgccgtacatgatccacggtacgggtgacgctttcgcgtccgcactgtgcggtgcggtgatggccggccgcggcctggccgaatcggctcggatcgcgggcgaattcgtacgtcatgcaatggaaagcacccgcaatcagccgcatttcgaggagcgcggggtcagtttcgaactcgatctcggtgagctcacttcgctggtgaagtgagaccgtgccgcaaagccggcaaaacggaactgcgccgaagccctggctgggccttcggcgcagttttgtatcagaaccactctgactcggaaccaaggaatccggcctgaggggaaggcgtcaggccactcccgtatcgcagctctcagtattcgcgcgtcttgggcgggaagtcattgatgtgcacggactgccacaggatggaggcgtgaggtgccgatgaagcctcggcatcggcggcatcggccatcccgatcatcgaatgtgcgaggaaacgttcgtcgtcacgcgccggataatcgagcctttgcagggaaccgcgcgattcgtggcgcgcctcggatgcgcgcagcatggcttcggcgagcagtgtcaggtgccgtacctcccagatcgcggttatctcctgattgaacgcgggcgtctccgaatgcgccgtgagacggctggcgcggggacggatcacagtatcgagcaggttcagggcctcgctgatggaacgggcgtcgcaacgcaccgccagcgcatgttccatcagcgttcccagatcggcggcgagccgatacgggttgtcctcctcggaaccgggctgcgcggaagcatctgagccgccgagctccgctgcctgcggcataccgtcagacgtatcgtctgccgcgtcatcatccgcgtccggtctgcccgcaagcatcgtggcgacatcctgcttgcgcgaacgggcgacgtcgtccaccagcgcggctgccgcctcggcgggaccgtcatccgcatcggcgccgcgcatcgggtcgtcgaccggcgactgtgcgatgcgggccgccagcgactcacctgcgcgcgtgccgaacaggcatgcgtcgagcagcgagttgccgcccagacggttcgccccatgcaccgacacgcacgagcattcgcccgcggcgaacaagccctccacgaccgtgcgggtaccggaatcggcgtcgccgttctggctccctgactccgcccagcgatacacctctccatccgtggtgatcgggatgccacccatcgtgtaatgcgcggtcggtttgaccggcaccatgtccttggccggatcgaggttcgcgtacgccttgatggtctccaccacctgcggcagcaccgcattcatatgatccggatcgatgccggtcatatcgagccacacgcagtccttcggaccgtccgggtctttcgggtccgcgacgccgcgtccgccgtcgatctcggccatgatcgaacggctcaccacgtcacgcgcggcgaggtcgagatgctccggcgcataacgttccatgaacgcctcgccgtcggcgttgcgcagcacgccgccctccgcacgggcggcctccgacaggagtatgcccgtgtgcgcgagacccgtcggatggaattggacgaattcgatgtcttccagctggagtccggcggacaacgccaaggccatgccgtcgccggtcagatcccatgaattcgacgtggtgtggaacagtcgtcctgcaccgccggtggcgaacatcacgttgtgcgcatgaattgcgtgggtgacgccggcgtgcgtgtcataggcgaccacgcccgcaacggcgctccccgacttgtcaagcaccacatcggtcacgtaccattcctcggcgaattcgatgccggccgcgacgcactgctgccacagcgagtgcaggatctgatggccgatgcggtccgccgcatatgccgccctgcgcacgggcatcttgccgaaatccgcggtgtgaccgccgaaccgtcgctgcgcgatgtggccgtcatcggtgcgggagaacgccacgcccatacgctccaggttgatcacggtctgcggggcgtactcggcgagcagcttggccgcatcctgatcgaccagccagtcgccgcccttgacggtgtcgtagtaatgccaatgccaatcgtcctgttccacattgcccagactcgccgcgatgccgccctccgctgaaccggtgtgcgagcgcaacggctgcagtttggatatcaccaggaccttcggctcgatgccggactccttcaactgttcgatgtcaggggagtgcatcagccccagcaccgccgacaggccggccgccccggcgccgacgatcaccgcgtcatacatttcttccacatgtttcggactcatatccaagattgtcgcacaagggctgacgttcgccgcgcacgtgacgggggcacggcggataataccgttcatggaagaaatatccgacagcacgacaacgcccggcaacacggcgacgcccggcaatgcggcaacatccaacggcacagcgtcatccggcagcacagcgtcgtccaacagtgcgacatcgttcaacagtgcggtgtatgacatcgtccggcggatcccgcgcggagcggtcgcgacctacggccaggtcgcgacgctggccggccgcccacgcaatgcgaggttcgtcggcttcgcgctgcacgccaatcccgaacccggcgtgattccctgccatcgcgtcgtgttccgtgacggttcgctggcgcccggcttcgcgttcggcggcccggagcggcagcgcgcgatgctcgaagaggagggtgtgccgttcatcccgccgcgggcgggtcacgacaatgccggtgacggtggatggcgtgtcgacctggcacgatgccaatggcaggcgtaacgcacgccaaggcaccatgctttcgcctgtaccatccgccacgagtgagtatcatcatcatgatctccgtctccctccggtttccggaacgatggagatgcgaccgttctcgacggttatcagtccgatgagctccatcgcccccaattgcgagagcacatgggcgaccaactcatgcatgccgcgttccggcaccgcatccgctccctttccttccgttgacttcccttccgttggcttcccttccgtcgcgcccgtctcaaggcctttttcacctgaccgggtgcgcagctgttcggcgacggattgcgcggtcggggctatccgccggcgacggcaccatcggatggcatcgatgatcgcccgctggctctcggtcatcgccgatgacctgttgccgcccgatgggctgctgtcgcgcaatatgccggcatcacgaggcgtcccgacatcgcagtccgagccgtctttccgttgagtggccacgtcgtggaacgactccggcggatgcggggcatgccagacgtcatccatgtcgtcgacggagcacacgatggtggcccggtgctcctgaatgagccggttgcagccgccgttgcccggcatgtcaatgttgccgggcaccgcatggatgtcccgctgcagttcgcttccccagttcacggtgttcagcgcccctgaacgcagtctcgcctgagtgaccaccagcgttgacgaaagcgcggctatgatgcggttgcgcgacaggaaccgcctcgcctccggaatggttcccgggcacagttcgctgaccagtgctcccccgttttccgcaatcccgtcgaacaactcgctgttgcactgcggaccggcatggttgaggcctccggcgaacacggccaccgtgcgcccggcccgtccgatgccgtacgcccgcatcgcgtccaatgctcccctatgggcggcggcgtccgcccccatggctccccctgaaaccaccagatgcccggcttgcgcggcatgcacggctatgtccgtcgtcagtcggcgcccatactcgttgacgccgcgcgagccaacgatgccgacgggctgcgggcaactggtcaatgccgcgcgatcgccactgccccacaggcacagcgggggcgcgcaacgacccagcaacgccaggtcgttgagacgggtgggccaccatacgtcatgcggcgcgatgatccattgcctcccctccatggtgaaccagccgcagagataatccctgtcccacgtggggagagttcgcaatcgctgctgccatgtcgccaacgcggagcgaaacgaacgcaccgcctgcggcgtgggcttgctcccccatcgggtcatgccgatgcagaacgcctgctcgatgaccttccccgcgccggccgacgtgcgcagttccgggtcgctgtcccggatgagggtgagcgcttcccacgcatcggccgtgcccttgaggagcgcggtcatcagcgcgtctgcggtattgaggcagaaagtcaggatggcccgagcgagcgtctcctcgtcaaggtcccagcaaaggccgctatccgactcgcatacagtcatgacatcctcgctctcaacatgatgccttgcgacatctcgtccggccccggcgacgttttgcccgccagatcggccagcgtccatgccagtcgcatggcccgatccactccacgcaggctcagccgatgcgacgccagcgccctgttggcgagttccagcgccttcaccgacgtgttggcgcgcatccacgaccccggcacttcggcgttgcagccccacccgtatttggaataccgttcgccggccgccgcccgcgccgcgatcacctgctgctgcatgacgtggctgccaatcgaatcgcgggtcggcgccgaggctatgcacgggaccggcggcacctccacctgaatgtcaatccggtcgagaatcggaccggacagtctggcgaaataccggatacggtccttctccttgcacacgcagcgctccccgttgccgtaggcgtaaccgcacgggcacgggttggctgccatgaccatctggaacatcgccggatagtaggtcgtccccttcgtgcgagacagggccacgtacccggattccatcggctcgcgcagcgtctgcagcgtcctcgcggagaattcaggggcctcgtccatgaacaggatcccgcggtgggcgcgcgtaatcgcccccggcatcgcaagccctgatccgccacccaccagcgacgcggtcgacgccgtatggtgaggcgcctcgaagggcggcatatcggagatgccataatgctgcagcgtgccgcacagggagcgtatcgacgccacttcgagctgttcctccggcgtaagcgggcacatgatgctcggcatcctggaggccaacatcgtcttgcccgagcccggcgggccggtcatcagcagatgatgtttcccggccgccgccacctgcaatgcccacttgacatgatcctggccgaccacctcgctcatgtcacccaatccgctgaaggccggcgtgtcctcgaccgtgcacgagaccgtcgcacggtcgacgccaagcgtatacgacgctcggcctcccgccagctcgatgagctcgcccacatgacggacgcaggtcacgtccatctgcggcaccaggcgggactcgtcctcgttgccgtaaggcacgatcagtcgccgtatcccccgctccttggcatgcagcatgatcggcagcagaccatggatcggcagcacggtgccgtcgaggttcacctcccccagaacgatcgtctcctccaggctgtcgtgcggaatcgcccccgccgcgctcagcacgccggccgcgatggcgaggtcgtgcgaggcgccccgcttgggcatcgacgcgggagacatgttgacggtgacgcgggtgtccggccatttgaacccgctcgcctgacaggcggatttgacccgttcccgcgattcgctgagcgaggcgtccggcaggccgatgacgctgaaatacggcagaccgggcgagatgaacgcctgaatctggatgatgaaggccttgagaccaatcaggccgaccgaaagggaaccgccgatagccatcagaacgcccccggtatgtggtgcaccgacaccatgcccgcacgcgcgacgatggtgagcacgtcgaaccgcacccccgtatgcctgatgcggtggtccggctcgagcagccactgcacgccggcgcgtctgagattcgtctgcttgtgcagggtgacggcctcctgcggcatgccgaaatggtcggtccgcctggtcttgacctcgacgaacgcgatgacgcggtcgggcgtcatcatgacgatgtcgagctccccgtaccgcgaatgccagttgcgccccagaatcgtgtatccgtgccgttccagccaatccgccgcatattgctcccccagcacccccagctgcttgggtttgagcgagccgtcgcacagccggcacagcatatcgctcagccccgccacgggaggatcatgatcggtcgtagcgcctgcgtgttccgctcggcttgtcaaacaggtgtccatgaccatcagtgcaccataaaaccgccttcgaccacatggttttcggccaatgtggtcgaaggcttgcccttcggcgtgttgtggatggaatgtggatgaatatccacttatccacatcgccggcacgacgacgattccgtgcgcggagccgaggcatgggcgcgcccgccaaggccatgccttatggcaaactggttgacgattctttgacttcaggaggcatatatatgagcggctcaagtgacgcgctggccacggtgaccttgcgggtgaacaggttcacgccgcgtcccgagcgtgatcgcccggcccgctccggcagccccttcgccaagaaaagctcgccattcggcggcgcctccgcttcggcgcgtcggcgtccccgcggcaagcagtgggttcaggagtacactctgccggttcgccgggaggatacggtgctggactgtctgctgaagatcaagcgcaccgtggatccgaccctggcgttccgttattcgtgcgggcatggcatgtgcggttccgacgcggtggcgatcaacggcacgccgacgctcctgtgcaccgcgaccgtcggcgactgggcgaaactggcgacgccgattcccctcgccgatggcgagggattccgccgcaccggcgacgcgggtgataagcggagcgcggacacgaccgctcccgaagaaaactcttgcgaagacaacgcaggcgcgcaatcccacgaactcggcatcatcgaactggcaccgctgccgggattccccgttcagcgcgatctgatcgcggacatcgacccgatgctcgaccagatcaggaagctcaagccgtatctgcaggccgatggcgtgctcgcgaccaccagcgaaggcaaggtggacgtgttcgaataccttcagcggccagagcagctggcgaaatacgagctgctcagcaactgcatcgcctgtggcgtgtgcgagggagcctgcccggtctacgccggcggcgacgccttcattgggccggcggccctgatctcggcctcccgcttcgtgaacgattcgagggacaccgcaaccgacgagcgactggacgccatcgacaccgccgacggcgtggccgcttgccaatccgtgcgcgcctgctcgcgccactgtccccgcggcatcgacgtcggcgaggagatgtggcagatcgtcgcccgcgtccgagagcgctgacagaccgaaacagacaccattcgacaacggttcaggggattgtttatggataagacctcatatgcgaatctcgccagggcatgggagtacgtcgaggatcacgcctattcccggcagacgcaagcgctgctggacgcgcgcgaacaggccgcccagtgcggtcttgcgcagggttccgcagctcaggcgcagctgctgcatacgctggcatgcatgatgcgcagcacctcggtgatcaccatcggctccggctcactcgtggagatcgtccagcttgtcgatgcgctgcacggtaccggccagttgacggcggtggattcctcgacgcagggaatcgcgctcatccgcaagatgttcttcgccctgtccgacacgacacaaacgacgctgcgcgcggtgaacgcgccggtgaacgtgtttctgccgcgtctcaacggcacggattacgacctgatcgtcgtctccggcgatgcggcgaactatttggacacgtttgcccaggcgccgcggctgctccgggagcacggcgtcatcgtgttcaccgacatgctcgcgttcgagggcgacgaggcgaacggcggtgtacccaatcccgccgaccgcagcgacaaggcggtggccatgcggcaattgctggacatggttcaggacgacgaccgtttcgaatcctctctgactccgaccggcaccggcctgctcatcgccgtcaagcgctaggaggcgatccggctgaccgccacttccacggcctcgtcggggtcgtccgtgatcagtaccagactcgggtcgagcggcgagatcatgccgtgatcctgcacggtcgacgtcagccattcgaacaggccgcgccagtattcggtgccgtacaggacgatcggcatcgacatgaccttgtgcgtctgcaccagggtcagcagctcgaacatctcatcgaatgtgccgaatcctccggggcatacgatcacgccggacgagtatttgacgaacatggtcttgcgcacgaagaaatagcggaagctcatgcccaggttcacccattggttgagcccctgctcgtgcggtagttcgatgcccagtccgaccgatttgccgccggcaagcgccgcaccacggttcgcggcctccatgatgcccggccctcccccggtgatgacggccacgccatgctttgcgattccacgccccatgcgccgcgccgccttatagtccgggtcggggcgcggcgtgcgggcggagccgaacacgctgaccgccggcccgagctcggcgagcgccccgaacccgtcgacgaactcggattggatgcgcagcacacgccacggatccatgtggagccaatcggtctcctgattgggtttgagcaggttggccgtagtgttgtcgttcggaatcatcgggccgcgcagaatcaccgggccccggtgataggtgtcgcccaacggcgatgcatcctgctgaacgccggagacggcggcgcgtaccgccgcgtcacccgtctgccgcccggcggccgatgatttccctcgttcggcacctgccgcggcgatgatgtcgttcagcgcgttgttcgccgccgcgtgggcgagcttctgcgcggccagtttacgcagcttctttttcttgccgcttttcttcgacgcatccgttttcgacatgatcacgcactccttgtcttggatgtctccaacataccagcagaagctccgttacgacaccgactccagctcctccttctcgaaccgcttggactgacggcttagtaggatgccgctgatgagcgccgcgatcagggatgccatcagcacgccgaaccgtccttccgcagacagctccgtgttcgtgtaggccagagaggcgatcaggaacgataccgtgaagccgatgccgcacgcgcaggctgcggggaacatgtcgcgcacgcgcagtcccttcgccatcgtcagcccagccacgtgcgtggacagccatgccgtgatcatgatgccgagcggcttgccgatcaccagcgccacgatgatgccgatgaccacgggcgacagcatcagcgccggggacagctcggcgaagtgcacgccggtggcgaacagcgcgaatatcggcagtgcgagcagcgaagagaacggctgcagcttgctcgcatagcgttgcgcgcgcggcgacttctcactgtgcatttcacgcgacggcgtcagcaggccgaccagcacgcccgccagcgtggggtgcacgccggcctcgaacatcatcacccatgccagtacgcctatcacggcgaccagcagccatgggacgcggcgcaatctcaccaggaacgcccagatggccgcgcatatggcgatgccgatgaaccagtaccatgcgttgagcgacgagaagaacaccgcgatcaggatgatcgccagcaagtcatcgaccgtggcgagcgtcatcaggaacgctcggatcgaaccgggcagcgccttggcgaacaacgcaagcaccgccagcgagaaggcgatgtccgtcgctgtgggaatcgcccacccctgcgccgcttcggcgaacgggacatccgcgccggtcgggatggtgacgattcccggcgcaggcggcgcgaaccgggagaacagggagatgaccgtaatgaacagcaccggcggcatcagcataccgcccacggcgcacagcatgggcacggcggcggctttcggatcggcgagcgaaccggtggtcagctcctgtttgagatccaatccgaccgtgaggaagaatatcgtcagcaggccatcctgcgcccaatgcccgatcggcaggatgatgttggtgccgggaatgcccagctgcgtctccgccaccgcctcgaacatgtgcgacgtccatggcagattagccagaaccagaccagcaaacgcgaacgcgagcataatcaggccggaaatacgatcggacgcggcgattcgccggatcctggcccaaaccctacccgtgctattcatgaaccctcaattccataccaggtgaacagcctgacgcggacgtatgcctgacatgtcaggattcggtgccatcagaccgactcctcattttacagacccccatcccactctacgccccgggctgagcctaacgaagcgagaccacaatcacaggggccaaaggcgagccgtgaagaaacagcagagctgcttgtaggcgaggagcggggaagggaggcgacggacaatccatatccggcggaagtcccatttattcgtcgccggatgggactttcgcggggaaggcgtgaggatgattccctgccgaccgccatccggctatcgcctgtaccacaccatgcgatttttgacggttttggggctggtgtggccaagggcgattccgggcccattcaccggtcattgaaaaatggcggtttccgcgacccgtgctttgccacaccacgtgatgtgaaggctcacatcgcatggtgtggctctctgctgtgccacaccatgcgattctggggtgtttttcgcctggtgtggcacacgggatgggagcgaatcagccggacggatgggtagggactgagtgcgggctgttccattgagctgagaaccacccccagtcatgccgcgcatgccagccccccgccagcgggggcgataatgtcgggcgtcccgctgtttgcctcacggctcgccccgccagcgggccgagaggcaatcccggttgccgaaatcaggcgcgctgtgacagggctacggcgatgttgtccagcacctgcttaagcagcgccttcgggcaggcgaggttgacgcgctcgaatccggctccgttctcgccgaacagcacgccctcgtcgaaatacactcgagcgcggtcgcgcatgaaatcgcgcagctcgtccgccgaaccgaagccaagaccgcggcagtccagccatgccagatacgtgccttccggctcgatgagccgaagtccaggcgtgcgttccgcgaactcgcgcagcagcgaaaggttgtcggcgagcacgcccatgagcgcatccagccacggttcggcccgctcatatgccacttggcacgcgacgagtccgaaatggctgacggtcaggccggcgatgttctccgccgccacgtcgaacgcccgcttgagttcggggttgacggtgatgacgttggagcacagcaggccggcgatgttgaaggtcttggtcggggcggtgaactcatagcagtggccggcgtagcgctcccccagcgtgccgaacatcgtcacgtcgtgtccggggtaggcgaagtccgcatggatctcatcggccagaatggtcacgccgtgggcgatgcagatgtcgcccaggcgacgcagctcgtcggcgctccacacgcggccgaccgggttgtgcgggttgcacagcatcagcgccgtgcaccgcggatcggacgccttggcctccagatcgtcgaaatccatgacgtaatgtccgtcgtcacccaggacgaggcggttgtcgagtatggtcaggccgttgtgctccgcggcggcggtgaaaggatagtagacgggtccttgcaggatcaccttgtcgccgggatgggtgaccgcacgcagtgcggtgttgaccgcgggcatgaccccgtccgacaggctcacccaggccgggtcgatgtcccagttgtgccgacgactcatccatgccgtcagcgcgcggaaatacccgtcggtcgcgtaatcgtatccgaagatgtcatgttgggcggcttcgaccagcgcttctacgatttccggagccggcttgaattccatgtcggcaacggacatggcgatcacgtcctcgcttcccacacccatgtcatcctcgatcatgtgccatttgatggatgtggtgccgcgccgttcgaccacggactggaaatcgtacacgtctgctcctcgtatgtattcgatggcgccggaacacggtcgtgggcggatgctcctcgttgcgcctgtctgctgtgcgcccatccattggaaaagccctcggaagcattcgctttcaagggctttttgtgcgccgaacaggattcgaacctgcgacctgctgatccgtagtcagctgctctaatccgctgggctaccggcgcataccgcgcatattgaattatgcacaaccgtgaattacttcacggctcgtgcgccagacaggattcgaacctgcgacctgctgatccgtagtcagctgctctaatccgctgggctactggcgcatgttgtcttgtttgcggcaactcaaataaattacatcaatgtaatgactttagcaacttggcgtgtcgcgcgcgtgtcgcgaacgtgccgcgcgcgtccccgtcatgccacgaggcgccgttccccacggaccagtttgggcagaccctcacccctgaccgaggccgcgtcgacgatcacctgctgcacgtcatccatgcctggaagctcgaacatcgtctcctcaagggtcttctcgatgatcgaccgcagccctcgcgcacccgtcccgcgcgttatggcggtcgtcgcgatggcgttcaccgcctgctccgtgaagaccagatccaccccgtcgacggcgaacatcttgcgatactgcttgaccagggcgttcttgggctcggtgaggatgcgcgccagatcggcctcggtcagctcgtcgagcacgctgaccacgggcagacgcccgatgaactcgggcagcagaccgaattcggcgaggtcgtcggcgctgacctgttcgagcagttcctcgggcttgacctcatggtcatgccaggaggccccgaagccgctctcgtggcgtccgagcctaccggcgacgatatcgctcagccccacgaacgcaccgccgcagatgaacaggatgccgcgcgtgtcgatggtcaccgtgtcctggtcgcggtgcttgcgtgtgccctcgaccggcaccgaggcgatcgtgccttcgagtatcttcagcagcgcctgctgcacgccctcgccggagacgtcacgggtgatagacgtgttctcgccggattttctggcgatcttgtcgatctcgtcgatgtagatgatgccgtgctgagccctctcgacgtccccgtcggcggccgagatgagccgctgcagcacggtctccacgtcatctcccacatacccggcctcggtgagcgtcgtggcgtcggtgatgacgaacggcacgttcatgaccttggcgagggactgcgcgagatacgtcttgccgacgccggtagggccgagcagcagtatattggatttggcgacctcgacgtcggcgagcggatccgtgcggcggcgacgcccgagcgcctgcttcttgccgtcgaactgcccggccgattcgcgcagttccatgttgacgcgcttgtaatggttgtagacggcgaccgacagcgtgcgtttcgccgcgctctgcccgatgacgtaccggtcgagataggcgctgatctcggcgggcttgggcagtgtcagggcgttgacatcggcgctgtgctggcgttcctccgagacgatgtcgacgcacagctcgatgcattcgtcgcagatggccgcgcttgggcctgcaaccagcttgcgtacctgatgctcggtcttgccgcagaacgtgcaccgaggcacgtcctcgttgtaactcaccacgcgccccatgcagctctccttcgactatgcgtcccgttatgcgcactgttacgaggatacccccggcctgacggcgacgggggtatccacttgtgaagattcatgaacctcacgaacggtgttcgagcacttcgtccacgatgccgtaatccttggcttcctgggcggtcaggaacgtatcgacctcgatgtccttgcggatcttctcgacatcctgtccggtgtgcttggcgagcgtgttctccagccattcgcgcatgcgcagcatctccttggcctggatctcgatctccgtggccttgccgaagccctggtcgatggccggctggtggatgagcacgcgtgcgttcggcagcatcaggcgcttgcccttggcgccggcggccagcaggatcgccgcggcggaggcggcctgaccgaggcagacggtctgcacgtcgggcttgatgtactgcatcgtgtcgtagatggcggtcatggccgtcatcgagccgccgggcgagttgatgtacatcatcacgtcacggctcggatcctgcgattcgagcacaagcaactgggccatgatgtcgtcggcggacgtgtcgtcgacctgcacgcccatgaagatgatgcggtcctcgaacagcttggtgtacgggtcctgcgtcttcatgccgtacggcgtcttctcggagaactgcgggagcacgtaacggttctgcggcgagacagccgcgccgccgcgcagcgcgctctcgcgggctgcggcgggcatgaacccgacgacgccgcgcgggccggcgagacggtcggcgcgggctgcgaactgagcttcctcggatgccatttcgatcattctcccttcgtcatcgaatcgtgcgtggtgatgatcttgtccacgaacccgtactccagcgcctcggtggcggtgaaccagtggtcgtactcgttgtcgcggtagatctcctccaccgtgtggccggtctgttcggcggtcagctcgctcatggtcttcttcatatccatgatgagctcggcgttgatgcgcacgtcggtggtggtgccgccgatgccgccggacggctggtgcatcagcacgcgggcatgcgaggtcaggaaccgcttgcccttggtgccggagctcagcaggaactggcccatcgacgcgcacatgcccaggcctacggtcgccacgtcgggctggatgagctgcatggtgtcgtagatggccatgcctgcggtaatcgagccgccgggcgagttgatatacagccagatgtccttcttcgggtcctccgcggccagcatgagcatctgtgcgcaaatgcggttggccatgtcatccttgacctcttcacccatccagatgatgcggtccttcaacagacgattgaaaatcggatccggcatcgacggcatgtcgccgtccgccatcaccggggatgatgtcagcaaatctgccaccttatctccttgactcacagtacgttgtgtctcacaatacgttacagcaattcactctacctgcccgaaccgacggcagagccctgcaccgccctttttcggctacccgcatagcgggaggacggaatacttgctctattgaaaatcaatttgccgtccttccatgtcggcagtgcccgaggttttgcgcactaccgtatctttcacccaacacgatatcgattcaatcactatcgacaataggagcgaagtcatcttcgcatacccccagagaaccgaagatggccactttttctgatcaaatgagaattaccacggtgatgaatcaacgcccaacaatcaattcatcattgcgacatgcctgccaagagaccacatcatgagatgagagcacgatgctcttcaacaatgtatggataagtcctcatggctaatctgtagtcaatgtcctgaaatatcgaaccatgtttgctatttcaggacattttctaatgagagacgcaatcaacccaacctgtgcagcagcccggacgatacgaaggcggatgccgccacggccataccgaccggcacgaagaactcaaacggcgcctcggtgagttccatgaccaggcacatggccatgagcggagcctgctgggatgcggagagcagcgcggcggccccgatcagggcgcacgcggtgaccgaatctacggggaagacgaacagccagagcagtccgagcatcgtacccagcgtggatcccagggcgatgccgggctgaagcacgccgcccgatgcgccggagcggatggtcatcagcgtgacgagcgccttggccacgaaggtgagcgccagcacgcccagcaacatccatagccggttcagttcaagcggagtcccggcgttgacgaccgagcccggagcgccgtccgagccggcgaggaacgtccatggcgaggccgctgcggacgcggccgattgcgccgcaccggaagtgtcggccgtttcggggatgaatgtgctgaagccgagctgcgccgcggcacgcccgttgcccatgacctgcggcacgacgatagagaccagaccggtcaccaatccggcgatcggcatctgccacatcagcgaccgtccggtgggcttgtgcgattcggcccactgcgagcccttgcggaacagtgcgccgacgacgccgcacgccgttccgcacagcagcgcgaacagcatcaggctcggcgtgctgttcatctgcatcgcaccgatgtcgtagaacatgtgctcgcctttgatggcggtcgcgacgaacgccgcagtcgcagacatccccaatccgaatgcgaccttctccaacgtcacgtcgacgagcagtatctccaccgcgaagaacatgccggccagcggcgcgttgtacacgcctcccagaccggcaccggcggcgacggcgacgaccatgcggcgatcgagcacgccatgcgcgtcgccttcgccgtcaccgatatggaagatgtcgcagaaccgctgcgccagcatggcgcccagctcgcgcggcgcgacctcgcgcccgatggaggcgccggagccgacgatgaatatctgcagcaccacatgcacgatggtctgccagaacggcatgcggcccccgttcaccgccttcttgacggacggcaccttctcggtcttcgtgcgcagcaggtaccatatgacgccggcgacgcccagtcccaacgtgacggaggcgatgcggcggaccgccggcacggtgaacgcgccgggaatgaactcgctttcgatgaatccgagcatcatgtattcgacgccgtacagcagcagcgtcagcaggccggcgcatgcgccgatgatcgcgccgagcaccagcgtggccgcggtcagccagccgatgcgcttccagtcggtcttctccatgatgcacctcttcgatggcgagtggaacgtccgggaacgggagacccgcccatgtcagcctacccgcggcatcctacacccgctcctcaccgcgcatatcccaccgtatatacgacttgacccggaacctttgcggttccgggccaagtcagtcattctgcatcacgggcacgccgcgatagcaacgatgccgcgcgatttacgctcactcggcgtcggcggtgttctcgtcgtccttcttggcgagctcgtcggcgacggcggccgcggcggaggcggcttcgacgctctcggactcttcgtcctcagcggcctcgccgaggaaggagctcaggtcgagggtctcgccttcggacttgaaggtgacggcgcgcatgccggcgagcaggcccttggagcggccgacttcctgcacggcggagccgagctggccgttcttgacgatggcctggatgaacgcggacgggtccatgccgtactgctgggcgatggaggcgaggaagttggtgacatcggcctgggagaccttgacgtccagcttctcggccagggcgtcgagcaccatctggtcggtgagctccttgacgacctgcttctcggcgtcggccttctgctcgtcggtggccttggacggatcggcggtcacgttcttgagctgctgctcaagcatgtcggccttgacgcccttcggcaccgggatctcagcgccttcctcaagcttggcgatgaaggcgtcgcgggcctcggtggcctgacggccttcggcgtcgcgctcggcggccttgcgcacgtcggccttgagctcatccagcgtatcgaactcagaggcatcctgggcgaagtcgtcgtcgagctccggcaactcctcggtcttcacggagttgaccttgaccttgacgagcgcctcttcgccttcgtgctcgccgccctgcagcttgctgttgaaggaggtctcctcgccggcggacaggccttcgagggcctcgtccagaccgtccagcatggtgccggagccgagctcgtagctcacgccttcctgggagtcgacggactcgccgtcgatctgggcgtcgaggtcgatgttcgcgaagtcgcccttggcagccggacggtcgacgccgaccagggtgccgaagcgctggcgcagggattcgaggcggttgttcacgtcctcatcggtgacctgggccttgggcacgtcgatctccaggccgtcgagttccggcagctcgatgtcgggacgacgctcgacggtcgcggtgaacttcagcttggtctcgtccttggcggattcgggcacttcctgcacgtcgatctccggctgggacatcggatggatcttcttctcctcaagcgccttggaatagagctccggcacgccgttgttgacggcctcgccagcgacggctgcgaagccgatgcgctggtcgatgatcttgccggggacgtggcccttgcggaagccggggatgttcacctgcttggcgatctccttgcgggcggcatccagatacgggttgaactcctccgggtcgacggtgatggtgagcttgaccttggtgggttcgagattcctaacgctgattttcacgcttgcgctcctgaaagtcgtttattctacttcatctgccggtaggcaacctctacatgataacgcgacttacggacgctgcgatgagattcacctgccagtcacgggcgccctgcgatttgaggaattccgcgacatcgcgcttgcgcggttcgtcggtccagcacaggttgcgcaggatctgcggcttgacgatgatttcggcgggggtgcgggtgtcgtcggcgatctgggagacgactttgcgcacgtcttgcagcagccgcatacgctgagggtgcctggtggcccagagcttcatcgagcgaggtgcgttcgcatgctcctcgtcggccacgggcgccggcatcaccggccattgcgacggcggcagctccagcgcgcgccgaatcgtctctcgccataccgagggcttgaccttgcgctgaatcggcgcgtaccgttcgaacatcttgtcctgctcgccgccggtgcgcatgcgcacgcgctcgttgagcgacctgatcatcctgaattcgcgggcgttgcggggctttcgcgacgcggcctcgactatcgaatcgtcggagagcagcagtccgggcgcgatgtcataggcgcgggcgagctcgtctcgcttctcccacagcgccttggccacggcgaggccctggtggtcctggctgacggtgttgatgtgcgatatgcgcagccagggcaccggatgctcccgtctgggtcccatgccggtctgcagcgcataccggaactcctcgtcggcccatccgtccttgccctgcaccttcagctcgcgctgcatcttccggcgcagctcaatcagcagttcgacgtccaatgcggcgtaattgcgccagtccctcggcagcggccgatatgaccagtcagcggcggaatgctccttggcgagcgtgacgcccagataatgctcggtgaccgcggcgagaccgaaccggtgcaaccccagcatcctcgcggcgatctcggtgtcgaacagggtctgcggcgtcaggccgatgtcggcgaatccgggcaggtcctgcaacgagtcgtgtaatatccacacggcatcgccgaccgcgtcgttgaacatgccccagtcggcaccggcgcgggtcagggcgacggggtcgagcagcactatgccggcgccttcgcgcttgaactgcgccagccagtcctcgtggccgtaccggaatccggaggcgcgttccgcgtcggcggccaacggcccggacgccccggccagacggtcgcatacctcccgaaatccttcaagtgtgtcggtcacatccggaacaccacctcgcggctgcgtctgcagcctcggctcatcggtcaactgacggctcctcctcgcattcgctggcggactgcacgaatcgcgcccagcactgcacctggccgcccgcgtccaaaccgccatccatgctagcaaggggtgtccatgagacacgcatctcgcagccggcggttccttcctgagcgagtccgaacgacgtgttctgcgtgacggtgaccgtacccgacacgtcacctaaggaggcgtcatccacgaacgagcacatcccgtcccagtacatgctcggggcgaggccatcgttctcgtcggacggcaacggcagctgcgcgtaggcgacgcaacgccagtgggagtgccagtcctcgcgttcgcgctcgacgtacagcagcatgatccagcccgaggccgtgtgggcgtcgccgaacgaacgggagtcgtcatccgcgacgcattccatttccacgccgatgccgtagtcggccagcgtcgagggcacgggaagctcacggtagcgcatgcccgtcacccgtggcatggaacgcaccgattccaccgccgaccagaccgcgtccggcacgccgaccgggcgttcaggcatgtcggcgtccgggtgccgcatcgttgcggagcccctcggaaacgcgaagatttcagccatatatacaggctacggtgtcgtcgaagattttacggtatttccacacgcaagattgtgtaggttttcgagtccgacaccgcagagaacggttccctatcagtacacgacgaatccgtgcgactggaattgctccgtcacgcgcttcttcaacgcggcggacgggcccttctgatgctcaagagggtacgggatgcgcagctcatgccacttcgggcgcccgagctggtggaatcccagcacgtcgatgtgttcgacggccccgtcgaagctctcgcagatcctggccacgttctcgatgttctcctccgagtcggtcagccccggcacgagcacgaaccgcacccagatcttcttgccggccttcgccagccgccgtccgaagtcgatggtgggctgcagcagccccccggtgaccttgtggtaggtctcctcgtcgcccgacttgacgtcgagcaggcacaggtcgatgtcgtcgatcatctcgtcggtgtagttggtgttgaggaagccggacgtgtcgaggcaggtgtgcacgcccatctccttggccgcgtggaacacgcgcgagacgaacgccggctgcatcatcgactcgccgccggagaacgtgatgccgccatgcgtggccttgaacaggtccttgtaccggtcaaccttcttgatcatggcgtcgaggtatacgggctgcccgtcgcgcatcttccatgtgtcggggttctggcagtactggcagcgcagggggcatccggacatgaagacggtcatgcgcgtgcccgggccatcgaccgacgtgttgatgtcccacgagtggacgaagccgatgtcgccgcttttgagcgcgtggatgcggtcgcgcctatcgaggccgatgggcgattcgaagccggaaagccctcccatcagggtctgcgaggcgtattccttcgacgctttgagcatatgcggccgtgtggtgcggaattgcgcgatatcagacatcatcgtcctccttgaaagtacttcctgtgttccatactacaaacgttttgcgcggcatccgcccgctatggacttcatgtcgtgtgaggatcatcacgcggattcccaagcgcgccgtcctgcccgaccatatgagaaggggacgaagccggtcggcctcgcccccttcatcgtccggtcgtcaccgtctgtcagtcggtgaccgaaccctggtggaaggtacgggagatcacgtcgagctgctgctccttggtgagcttgacgaagttcaccgcgtagccggagacgcgcacggtcaggtgcgggtacttctccgggtgctcgacggcgtcctcaagctgctccttgcgcaggacgttgatgttcgcgtggtacaggccgtggccgttgccggcgtccaggatgccgaccaggttgccgatgcgctcatcctcgtcgcgacccaggccgtcgggggtgatcgtgttggtcagcgagatgccgtccagcgcgtcgttgtagtcgatcttgccgaccgagaacatcgacggcagcatgccgtgcgagtccatgccgttctccgggttggcgcccggcgcgtacggcgtgcccttcttgtggcgggacgggaaggaaccggtgttcttgccgtactccacgttggaggtgatggtcaggatggactgcgtcgggacggcgccgcggtacacaggcaggcgcttgacctgacccatgacggtggagacgacccacttggcgatgtcgtcggcgcggtcgtcatcgttgccgtagatcgggaagtcgccttcggtgcggtaaccgacgatcaggtcgtcatcggcgccctcgacgtactcgtactcgtggccttcaaggttcttcgcgtccttgttgtagatcgggtagaccttggcatacttgacggcggacagggagtcggcggcgatggacaggccggacatgccgcaaccgagggtgcggtacacctccttgtcgtgcagcgccatctcgatggactcgtaggcgtacttatcgtgcatgtagtggatgatgttcagagccttgacatacacttcagacagccagttcagggccttctcgtagttgttcttgaccttctcgtagtcgagcgtgccgtcggcctcgggagcgatgggctcgatgacgcccttgtcgatgacctgcatgccggtcatctcgtcacggccgccgttgatcgcgtacagcagggccttggcggagttcacgcgggccgcgaagaactgcatctgcttgccgacgcgcatcggggacacgcagcaggcgatggccgcgtcgtcgccccagtggttgcggatctccttgtcggactcgtactggatggccgaggtgtcgatcgagatcttggcgcagaagcgcttgtagccttccggcagcttcgggtcccagaagattgtgatgttcggctcggggccgggtccgaggtgctccagcgtcagcgtgttgagcaggcggaaggaggtcttggttaccatcggacggccgtcgtcgccgaagccggcgtcggaccaggtcgcccagtacgggtcgccggagaagatcgcgtcgtagtccttggtgcgcaggaagcgcacgatgcgcagcttcatgacgatgttgtcgatgatctcctgggcgtcggtctcggtgatcttgccggactgcaggtcacgctcgaagtagcagtcgaagaacgcagagttgcggccgaaggacatggcggcgccgtcctggctcttgacggaggcgaggtagcccatgtaggtccactgcacggcctcctgcgcggtctgcgccgggcgggtcaggtccaggccgtactcgttgccgaggttgatgagctgcttgagggccttgatctgctcgtcgtgctcctcgcggaagcggatccagtgctcgatctccggctcggtgaagtcgttgcggtacggcacggaatccttgtcgcgctgcttgaacttgatcagcgcggcgacgccgtacagggccacgcggcggtagtcgccgatgatgcggccgcggccgtaggcgtccggcagaccggtgaggattttgttgtggcgggcgatcttgatgtccttggtgtagacgccgaagacgccgtcgttgtgggtcttgcggtacttggtgaagatcttcttgatctccgggtccggctccttgccggcctccttgatggcctgctcgaccatgcgccagccgccgttcggcatcatcgcacgcttgcaggggacgtcggtctgcaggccgacaacgacgttgtcgacctcgggggactcgatgtaaccggccgggaaggcgtcgatgccggccgggatgtgggtgtcgacatcgtagacgcgctgcttgcgctcgaccgccaagtagttgtcgtcgaggtacttccacaggtgcttggtcttgtcggtcgcgtcggccaggaaggactcgtcaccggtgtacggggtgtagttcttctggatgaagtcgcgaacgtcgatgtccttctgccagtcgccttcgacgaagccgtcccaggccttggcctgaagctcttcggcagtaagagcggtcgcatcaactgctgtcatattcactccttgtgtcgtgcaacgcatcttcacgttgttgtcaagaaatgattctactagccggtcgatgtgagctggctgagagatggcgtgacttatctcacattcacgccgtgtcgtcagtcgtcgaagccgtcgaagccgtcgtcgcggccgcccgagggcgtgttctcgccccatttgcgccacttgcgattggcttccgcccacagcgcattgcgctccttgacgatcttccacgcctcaagggcatcctcgcgggtcttgtacggccccatgcggtgggagctcggtgagagcatgcccaactcgggctgctcggtcttcgtgttgaaataccactgcttgtcggtcatggtgtcctccccgcacccatggtagcgcgccgcggcggccgggcgagcgctcccctactcacggaacgcgttggtgacgggcagacgccggtcgcggccgaacgcgagcgcggtgaccttcggcccgagcggatactggcggcgcttccactccgcgcggtccaccagtcgcatcaccgtgtcgacggtcttctcgtcgaagccgtcggccagcaggtcggcgcgaccgtgcgcatgctcgatgtatgcggcgagcaccttgtcgagcagttcgtattcgggcagcgaatcggaatccttctgccccgggcgcagctcggcgctcggcgccttctcgatgctgctgaccggaatcatcacgccgccgggcagcggcgttccggcatcgccgttctcattgccgacgatgcgcagcccgccgatgccgacgcctgcggcagcggcccggttgcgccagcgggacagttcccagacacgggtcttgagcaggtccttgatcggcgcgtatccgccgacggcgtcgccgtagatggtcgaatagccgcacgccagctcggacttgttgcccgtggcgacggcgagcagaccgaggctgttggagtacgccatgacgatgacgccgcggatgcgggcctgcaggttctccgcggccacgccttcgagcttgagctggccctggtacacattgaacatgggctcgatcggctgcacgtcgtaatgtgcgccgatgttggccgccaggtcggcggcgtcgtccttggaaccgatggaggaatacatgctcggcatcgagatgccatgcacgttgtgtccgccgcaggcgtcggcggccatcgcagccaccagcgcggagtcgatgccgccggacaggcccaggcacacgccggagaaccggttcttcgccatgtagtccttcaggcccagcacgcaggcggtgtacacctcctcgtccgggtcgggaaggtccgcgatgtcgcccgtcgtctgatgctcggcgtccgtgtcgaggtcgaagagtcccagatgctccatgaacatcggggaacgttccagcagcgtgccgtcgcggtcgacaacgaagctgccgccgtcaaacaccaggtcatcctgaccgccgacctggttcacgtagatcatcggggcgccgacctcggccgcacgcctgaccgcgaggtcgtaacgcgtatgggtcttgccctcctcgtacggcgagccgttcatcgtcatcagcacgtcgatatgctcgtcggcgagccgggcgaccggcccgccgtcctgccagatgtcctcgcagatcgccacgccgatgcgcacgccgtcgatgtcgagcacgacggtgcggtcgccggccgcgaagatgcggaactcgtcgaacacgccgtagttcggcaggaaatgcttgtcgtagccggcccagaccatgccgtcgtgcagcacgaccatgcggttgcgaggtttgtcggacgcgtggtcggtgccgaccgtgccgacggcgacatacaggtcgcccaatccgtcggcctccagctcggtcgccagccagttcgccttgtcccacgccgccttgcggaacgtgcggcgcaacgccagatcctcgatggggtatccggtcagcgtcatttccgggaagatgacgacgtgggcgccttcatgcgcggcgagatgcgcgtagtgcatgattttgtcggcgttgccgtcgaggtcgccgacgcaggtgtcgatctgggcaagggcaaaacgaagatgggtcatagtgccctatagtacccagccgagatgacggacgacaggggcggcacatgccgtcacgcgggatgatccgtcccaccgcccgtcagcgaagctcggcgagcacccgcagcgaggcgttgacgtagaagtcaacggcgggcccgatcgcgccgtccacgccgacgaagtgcggactgtgccagtcggcgcaccccggttccccgttcgagccgatgaacgcgaacaccagacgggccccgcatcccgagaactccacgaaatcctcccccgccatgctgggatgtatcggcttgagcgccgcataggagggcacgtcggccgcgaccgcctcggacagctcctcgtcgccgaccagcggcacctggatgcagtcccagtccacgtcggccgcgatcccgtacgcttcggccgtgtgctcgacctccgccacgaaacgccggtggaccagccgttcgtcgtcctggtcgaagaagcgcacggtgccttggaatcccgcttcggcgggcacgacgttccacacgtgcccgccatgcacttcggtgatggacagcaccacggcgtggaacggcgagatgttgcggctcacgatggtctgcagggcgaggatcatcgaggcgagcgcctcgatggggccggtgcccttctgcgggtacccggcatgggtgccctgggcgtgcagcgtgaccttgaacttcacgcagccggccatcatcggctgagggccgatggcgatctgtccgggggcgtagttcgggttgttatgcgtgccgatgatggccttcacgtcatccgtcgcgccggattccacgaccgtgcgggcgcccaggcccacctcctcggccggctggaaaacgatcttcacgctgcctgcgatgcggtcgcggtgatcggccagccagaacgccgcgcccaaaagcccggtcatgtgcaggtcatggccgcagccgtgcatcacgccggggttcatcgagctgaacggcaggccggtgtcctcggtgatcggcaggccgtcgatgtcggcgcgcagcgcgatgcgcggtcccggcacctctccctcgatgagcgcgacgacgccggtctccaacgtcgtgtcgagcacatctatgccatgcccgcgcagcagacgggccagatacgcgctggtctcgacctccttgaagctgcgttcgggatgctgatgcagataatgccgtatgccgatcagctcgtccgtgaccccgacatgttcgaccatgatttacgttccttccccgcgagatgtcatgccatgttacctctgtagcttcaatatacgcttggcgatggcgttcgcgatgccctgcacgatccggaccagcacgatcatgatgatcacggccgtccaggtcaccgtctggtcgaatttctgataaccgtccagtcggtctggtggccggcgatgtcgtacgcatggggccagggactcatcgcgtctcctccttgtctgccgcggacggctgcggcgatggcgtcctcgtagcctatggtgtccgccgccgtgccgaagtcgatgacatcgctggaacgtgacagctcccccgagaaagtcgcgcaccagcgcatcgtcgcccgagaactcgtaggtgatcgagccgatggccgaaccggataccgtgtcgatgaaccgcttggccaccgcctgctggggtgccgcgaacacgttgcacacatctccgcgctccacgacccggccggcgctcatcacggcgaccacgatgagggcgatgacgatgttgcgcacggtatggttgacgcgcaccggctcattgtcgggagagcccgcctgttgtgttgctgctgtcatgttcgttcccactctgattggttgacaacgcccaccatacggcagcgacggcggcagtcgcagggcgggtctgataacgcgttacggaatgccatccagcgctgttcatacactggggatgaccgaatttcgtatcgcggaggttgcgtacatggcatcggacgacatcatgacagcgggcgccggaggcgcgacggccaccgtgcgagccgacatcaaggcggcgttcttcgacatcgacggcacgctgacgagtttcgtgacgcatgtaatcccgcagtcctccatcgacgcgctgcacgagctgcaggatcgcggggtgaaggtgttcatctgctccggtcgggcgccgtcgcacatgaccgtcgtgctcgacatgatgccggtgcacttcgacggcatcatcgcgctgaacgggcagtactgcttcgacgaccacgggctcctggagaaggagtcgctgctgcccgaggacatcgtcaccatcacccgctggcttgacgagcaccccgacgtggtggcgaactactgcgagaaggattacgtctacttcaaccagatcaccgacgcgatgcgggccacgtggcgccaactcggcaagaccgcaccgaccgtgaacatcgacgatccgcacgagagggcgctgaagcatgagacgttccagatcagcccgtacatcagctttgaagatgaagcgaagctgtccggcatgtgtcgcaatgtcagaggcgtgcgctggcatccggacttcaccgacctgattcccgccgacggcggcaaacccgagggaatgaagcggttcatgcggcattacggctggacgcgcgagcagaccatcgcgttcggagacggcggcaacgacgccgacatgctcgccttcgccggcatcggcgtggcgatgggcaatgcgaccgaaccggcgaaggccgcggccgactacatcaccgatgacgtcgaccacgacggcatcatgaacgcgctcaagcacttcaacgtcctgtagctccctcccctcccgctggcgggaggtggcacgcagcgccggagggtggtaacagacccggcacgcatacgaagagccctgacccgacgagggttcagggctcttccatgtgtatcggagcgtcggcttcgaattgccgccgcgcttacttcaccacttcgatggacatgatgccggcaggttcgagcggcgcgtcggaacggtcggtcggcacggcctcaagcttgtcgaccacggccttggactcgtcgtcggcgacctcgccgaagatcgtgtggtgtccgtcgagccacggggtcggcacggtggtgatgaagaactgggagccgttggtgccatgcgccttgccgtcgcggccgcgacgcaggccggcgttcgccatggccagcagatacggccggtcgaacgtgagttcggggacgatctcgtcgtcgaagtcgtagccggggccaccggtgccattgcccagcgggcagccgccctggatcatgaagtccttgatgatgcggtggaaggtcaggccgttgtagaacggctcatgggacggctggccggtgaacgggtccgtccattccttctcgccggtcgccagaccgaggaagttcttcacggtcacgggcgtctgatcgtcgaacaggttgatggtgatgtcaccttcggaggtgcgcatgatgatggtagtcatggtcccaagtgtctcatgggcttgagaccgggcggtgatgccaatcaagcggaatgtatgtgagtggcttgtgacgtgtgtttatattgcatataatttacataattattatgtaacctattgaggggatgggaggctgctatggctgtgaaggaacggacgaccattgcattggatccggaggtcaagcgcgaggcgacggacgtgcttgagcggatgggtttgagcttgagctcgttcacggagatctgcctgcggcaggcggtccgtgacaagggcatgccgttcacgccgagtctgaggccggtccgatccgacgggtatccggttcctccggctcacgacgcgtatcgtttcgagcgttcgaagagcacgggcaatatcgtgctgcctcaggagtgggacgatccggcggatgacatctacgatcatgcgtgagccggaagtgtacgacgtgtggctgatgcgcgtcgagttccccgatcatcccggcgtgggcaaggtcagacccgtcatcgtcaccagggtcgaggaggatcgggtctcgggcatcgtcgtcaaggtgaccagcgtgacgacatggaacggtccgggtgacgttccgttgcttgactggcgtcaggagggtctgtacaagccatccgtggcgagatgctcgcagcgtttctggttcggcaatggtgacttgctgaagtatttcggcaggctgtcgttgcgtgacgcgaacgacctggatgccggtcttgatgctacgggcgacgtcccgccccaccgccagtcgcattcatgatgatggcggggccaacggtttttctccctggatattatctgcatgtcgatgtttgtgttcgatgaacgaaatggattgttggttgtcggcgtattctgcgcaacgcgttttccgacggtgtcgtcacgggcgtgatgccgcgcaatgcgaggatggtgggtgattttggggactggcgaagatgccaggctccggcggggacggtggagtgctcccggattattttcgggtgcctgtaggcgcctcgtggagaacgaggctgatcggtaggtttcccgaaatcggaaaaccttggaatagagccgaaaacgaccacgtgcgattatcatgcgaggtgcgcatgatgatggcagtcatggtcccaagtgtctcatgggcttgagaccgggcattgctgtttgattgcggggaatggcgcagcgggcccgtggactggccacggccggtagccgggccgccgagctgcaacgtggaacgtcatacgaattggttcactatgatcagcgcaccggcagcgacagccatgagtggctcctgctctgtattttgatgctcctatacattgtcaatcgtttggaaccgttgtttgagttcgggcaggttccatgctccgcgttcgacttcgttgatgcggcttgacggcacggtcggcgcctcgccgacctgctgttgaagaaggagcttgtgtaaccggaaccgctacaccacgatcgagcgactgaggcgcgacctcaacgactacgtgtggtaattcgacgaccagcggctccgttccatcctcggataccggagtgcgaaggaattcatcgaacgaggatcgtcctctaaggacctatccaacacgctgttgccaatccgattggcatcatggagttataatttttctgtgatttaggtatgtaatgtagccctaatcataagttgtgaacgtcttactcgcgtatgttcgtagacactgaaagtcaacggacatacttatcccagttcctacgtgaaccaactcccggggagatcaacatgactcgattccgcaatacatacacaaccctcacaaccttcgtgtcggccgctgttctccttatctcgaccactgtgccggcatccgcatcgcccatggcaagtgatccattgtcttcgtccaccacaacagccgtgcgtgcacaggtaacagcccttggtgcaaatcgtacctacacttacgttccgaccaataacacaagcgtcggcgaccccatcgtcacagcctactggactccagaacgcatgaagagtgccattcccgctgatacaccaacaagcacgaccgaggtaaaccgacagattgacgagctcgaacaaccggctctggcagacgaaccagttactgacggatcgtcccccgtgacggcaatcttgaacgcaatcacgccacaggctgtgacgccagtcacgaatttctcaaagaccaacggaaaagttttcttccgcaatcagaccgacggcaaggattacgtatgctctggagcctccgtcaatagccgttccaaacgtctggtcgttactgctggccactgtgtccatggcggcccaggaaaagattggcataccaattggatattcgcaccgggttacagcaacggtgccacgtatggcacttaccaagctgccacgctccgaacgctcaatgactggatcaactatggtgaatccgggcgaggattcaattcagacgttgcctttgttaccacctatagtggcagcacttccggggatactgttgtaaacgcggttggtggtcacgggtttaggtggggcggaggtactggtttcgacgtcagtattttcggctatccaacgaacctcagcggaggccaaagcatgtgggcctgctggggctctagtcaaactggttggaatggcctttacaagttcaaccatattactggttgcgatttcggcggtggttcgtccggtggaccttggctcgacgaatacagcaataccactggtctcggatatgtacgcagcgtaacctcgaacggccccgcagacaattcctatcttcgaggcccatacttcgacagccgcgtcaacgacttgttcgttgcagcaaacaaggactggtgaaacaacatcatggccagttggattcgcttccgcagccgttttgttgctgcgcttctggtatttgctttgaccagtatcacggtaatgggatgcgcaactaacgggagcgaatccagccccagctcaccaggtacagatgcaggatacgattccgcagcaaaggcaccggagcaatcctccaacgacgtacagcaacgaaccgacctcagcaacgaacatatatcctcatggaaccgatacgaagtggtctcggacacctccgtgcgcattttcttctccatgggaaatcccaaatgtcatggtgtacgggccaccgtcgacgaagactcctccgcagtgctaatcaccctctatgagggaacactccccaacgcaccaaccgaatgcgccgagatcgcagtcaatgcatcccttctgcttaccacacgcaatcccatcggaacccgttccgtaattaccggataaatggtccagacctttggaactaaacacgtaattccaccggcgtcgccatacacatgcttgggaccggtaaactagtgcagcccaaacaaccacgtagatcgttcgggcattaatcgaaatcaaacaacggtatgtcgccgccgaaccgtccgtgatcctcgcgatttctttcatcgaaccggcgtgccggacaccatccacgaacggccacgtcgagcagatggttctgcgcgacggagacattgaaggcctcgtgcccggcgtgcctgttgtccgacacggagacgtactgctgggcgaatgcttttgggcatcgcccatgctgaacatcatgaaaccacaaggcggatcgttctttttccgtgccggtcggcgaagacgttgagcgccggcaggacggtggaatgtcaccggattgttctcgcgtgcctgtagatgcctcggcgaaaacgaggttgatcggcaggcctccccaaaatcgaaaaccttggaataaagccgaaaacgaccacgtgcgattatcatgcgaggtgcgcatgatgatcgtactcatagcggtcaagtcttgcagaacgccccgacgcggccggcagcatcgccgcgcccgtacaccgtcagcgcgcgtacaccgtgggagagccgctcagacgcgacatcgccgactgggggatgtcatggacacgccccagaacggcgtccaacgtcgacgagacggcatgcggcgcccggcgatcgctgcaatccgtccaggagggtcgttccatcggggacgtcatggccgtccgaccatccgcgccggcctccatgtcatactcccggcgaccgtatcgccagagagtcgcattgctgttgcgaaccacccgcgccaaagccgggcgacgtctacgctgaaggaagaacatgcctgcctcgatcccgtatgggcgccgtccctctgatgtccggcgccggtcgatattcatcgtgtcaccataggcgatcccgccaatcgatgacactatcgattacacaccggatcgtgccgtcatgccctcgtccgaaagggtgattttccgcacgcccgtcatccccggggccgtccggcattgcaaaggtcacgcggaaccggcagcggacgggcggaagacttagacgatcgctggaacgaacccggctactgcatcttgcgcaggcgtggcacggcggaatccttcgcgccggtgacgcggtacacgtcgaacacgccgtcgatcttgcgcacggcagcgagcagacggttcagatgctgcgggtcggccatctcgaagctgaactggctgatcgccacgcgatcggagccggtcgcctgggagccggacaggatgttcacgccgtggtcggccagcacacgggtcacatcggacagcagatgctggcggtccagcgcctcgacctgaatcctgaccatgaacaggcccttggtgctggtccatgccacatccacgacgcgctcgggctgacgtcgctgcaggtcgatcatgttctgacagtcggcgcggtgcaccgacacgccctgattgcgcgtgatgaagccgacgatcctgtcgccgggaaccggcatgcagcagcgcgccagcttgacccacacatcgtttacgcccttgacggacacgccgagggagctggtcttcttcttggcgttctcgaccgcgcgcagcggcagcgcctcctgctcaacctcctcatcgacctcgtcgctgcccgcgtccttgaccagatgcgcgatgacgttctgcgtggagatctgcccgtcgccgatcgccgcgaacacggcgtcggggttggggaaattcagctcgtcggcgacgccgaccagcgcctgggtggtcagtagcgtgccgatcggcaggttacgcttgcgcatcgcgcgggtcagctcgtcacggccctcctcgatggcctcggtgcggcgctccttggagaaccactggcggatcttgttgcgggccttggggctcttgacgaagctcagccagtcgcgggaggggccggcgttgtcggatttcgaggtcagcacctcgacggtgtcgccgttctcaagcttggtgtcgagcggcaccagacggccgttgacgcgcgcgcccatcgtcctgtgcccgacttcggtatgcacggcgtaggcgaagtccaccggcgtggcactggccggcagcgagacgatcttgcccttcggggtgaacacgtagacctcggccgcgcccagatcctccttgagcgagccaaggaactcgttcgagtccggggtctcgctggtccaatcggcgagctgctggatccatttgaggttgtcggcctcgctcagctcctggttgtcgtcggaaccgcgtttgagatcggatttgtcgggcgtgctcagggcgcggcccgcctgcccgttctccttgtacttccagtgcgcggcgatgccgaattccgcgcgccggtgcatgtcccaggtgcggatctggatctcgaccggcttgccgcccggccccacgaccgtcgtgtgcaacgactggtacatgttgagcttgggcatggcgatgtagtccttgaagcgcccgggcacggggctccaacgcgcgtgcacggcgccgagcgccgcatagcagtcgcggatcgtgtcgacgatgatgcgcacgccgaccagatcgtagatgttggcgaaatcatggccccgcacgatcatcttctgatagatcgagaagtagtccttcgggcggccggtcacgtacgccttgatgtgctgcgcgtcaagatcctcgttgatctcggcgaggatctgcgcgagatacacgtcgcgctggccggcacgccgcgcgaccagcaccacgatctcgttgtagatcttcgggtacagcaccttgaagctcagttcctcaagctcggtcttgatggcgttcataccgagcctgttggcgagcggcgcgtacacgtcaagggtttcgcgcgccttcttctgggcgctggacgacttgacgtaccgccatgtgcgggcattgtggacacggtcggacaacttgacgacgagcacgcgcacgtcgcggctcatcgcgacgaccatcttgcggatggtctcggcctgagcggaatcgccgtattccatcttggagagcttggtgacaccgtccaccagaccggtcaccgtgtcgccgaattccgcgcggcactcgtccagcgtgtagtcggtgtcctcgacggtgtcgtgcagcagaccggcggcgaccaccagcggccccatgcccaggtcggcgagaatctgcgccaccgcaagcgggtggatgatgtacggctcgccggatttgcggcgctgtgaggaatgctggatgaccgcccgacgataggcacgctccagaatgctcagatcctcgtcggggtgatggttcctgcacgcttgcatgatcggcagcagcgggttcagcgggtcgtcgctgatctcgcagccgagcatgcgggcggcattatgctcggcttcatcgttggccatgtctgcctccctctcaggtatttggtatcacatcctacccgccgcgaatgaaaaagcatacgcggcatcttccgccgtgaacggtctcccgcatgccttggcttgcgggccgtgacggccgtgttcgcaccgtcggccaggatcgtccgtcaggatgacacgccggtggagccgaaaccgcggtccgcacggtcggaacccggcagggtgctcgccgggacgaacttcgcctcaacgtaacgctggatgaccagctgcgcgatgcggtctccgcgatggaactccatcgtatgctccggatcgaggttgatcagagggaccttcacttcgccgcggtacccggcgtcgatggtgccgggcgcgttcagcacggtcacgccgtacttgacggcgagtccggacctcggatgcaccagcgccacgtatccggcgggcagggcgatcgccatgccggtcggcaccagggcgcgctggaacggcttgagcgtcacgtcctcggcggcgaccaggtcggcgcccgcgtccccggcgtgggcgtaccgcagctcgaccggatggccgggatcaagcgatttgaccaggacctcggtgtattcgggctcgtcatatgtctcgtcgaacgccatcaggccgcgcattcctcgcacaccggctggccgtcgtcggtgacgtatgccagctggctgcgatgtttgaccaggaagcactccgagcagatgaactcgtcgttctgcatggggatgacggtcacggaggcgtcctcgttgctcagatcggcaccgggcagttcgtaatcctcggcgatggcgttctcgtcgtcgtccatatcggttgaagagctgcgcgagcccttgcccaactcctgcagcgattcctcatcctcgtccttattgcggggggaatcataatcctgagccatctgaatcctttcatcatggtggcacgttctgcgccatagaatacatgacttttactcggcataggatacacgatttgaaatactcgtaaaatacgacacgtggggcacaatagaagaagttgtaattttctgaggaaagtggtgtgaacatgcctgagaacccgctcacacaagcccggttcgaccacgtcgacgacgcgggtcgtctcgtgttcgcgtcaggcgacgagcgtttcttcgtcgatgtggacgaaacgctggaacgcgccattctggaagcgaagcagatccgcgaggagtcccggtcggctcccagcgcatccagctcggctacgctaccgatctcgcagattcaggcgcttatccgggccggcgcggatcccgcgcgggtggcggaacgataccgtctcagcgaggcgctggtgcggcgtttctcgtccgccgtcgaggtcgagaagcagtacgccatcgagcagttcctcaccgtgccggcccccaaggagagccgtggacggaccaccgccgacgtggtggagcgcgcgctggcgctgtccggcatcggcatggagtcggtgacgtggaaggcgacacgccggggactcgaaccgtggaagatcgccgcgacgttcgacgccgcggggcgcaccgtcagggcggaatggtcctggaacatgcacgacaacgcggtggcatgcctgaactccacggcgaagaagctgctgggaacggcgacaggcgcgcgcggcgacgggaccgagggcacgccctccgagatgctgcccgcgacgctgcccggggattcggtacgctcggcgaggatagagcgcaccgtgtcggcgtggaacacccctgccccgacactgcctgcggcgcgccccgaagcgcggatgccacgttcggcgtccccgttggacgtgcgcaccgagcctgcgccatccgagaaaggcccctcaatcgacatcccgcgcaccggcgcgcttccggcgaaggccggcgaggccgcgctcggcgccgccgagtcgaaactgccgcggccgacaccggattcggacgcgtccgcttccgcggctcagacggcacccgagatcgaatccgaatccggcaagacgtctgccgaacgctccgaccggcagacgccgcctgcgaaacgccgttcgggtcgctccgccgtgcccagctgggacgagattctcttcggcgagtaggatcgtctggcccgccgtcgctgtccagcgagacacgtcaatccttttttacggaaaaacgcgacaggccgtccggataatgagacatcggcgtgacacgttcggcatcgaaacggtcacgccacgtcaatcaggcagggaatgtccatttccagcgccgtctgcgagccatgcacacccggcagacgcgtcgccttgtcggtctggatgcgcgaatccacgaaggtcgccctcccggccgccgataccagcacgtcaccgagcatcggcctgacacgcggctcgacgacaccgaacatgccctgatcgatcgcctcatcccgggtacgcaccagggcggcgtcacccagccgatcgcgccatcgacgcgcgatgtcattcgggtcgcaatccggctcggcatacagcatcagagacctgggctccccgccgaccagggccacgccccgggcgagctcgggattctcggcgatatcgacgcgctggtccggatccgaaccgaccatgccatgatcagccacgatgacgatgagcgtgcccctcggcgcaagcctgtgcaattgcgccagctgttcgtcaacccgctcgaacacggccgtccactgctcggactcccagccgtaggcgtgccccaccttgtcggcgtcgcggatgtacaggtacgtcagccccggcgtcttcgaggcctcgcacgcggctctcacgcggccgagcggccgcatatcgcccttgtagtccgcaccgcgcaacgcggccttcgtcagcggggagtcggcgaacttcggcagtccgcagctggtgacccgcacgccggcggcccgcagggtctcgaacaccgtgggctccctctgcaggtccagaggcgcgatcgcgttgtcgaactggatcagctgcgacagctcccccgtttgggtgttgcgctgcgtgtagcccgccatccccgtcaggcccgggcacgtgccggtgccgaaagccgccatcgcggcgacggtggtgctcggcgcgcatgtggcgatgggcctgtcgttggactcgtcgcgcagcaatgcgcgcagatacggactgtgtccgacgcgcatccgaaggttccagtaaccaaggccgtcaaccagcgccacgatcacactgtcggccttgggaacccccagggcgacgcgcaaggcctccggatcatggtggatccgcgtggcgaccggatgccctatcgccgcgctgaccgccggcagcacggcggacaggtgcagcgccccgccgcgtacggcgtcgcgccgccagtcgccataccgaacggtcggtatcgtctgcagcaattcgtccatgctcgcgatttcagcgttcatgttttccattcaagcaccgtccgtcggaaaaggacacggctgggcgggattcttggcatgattgttcgctatcatggacgattggatttttcaacggcaccatttcggccattcgcgccatgcggatggccgaagcacagattggggaatggcacctatggcacatcgcaccacgactcatcaggcctatgacccgcgtcaggtccaagagcatatcgtggaaacgccgttgaacgaggaaatgagcaagtcgttcctcgaatacgcgtattcggtgatctacgcgcgagccctgcctgacgcgcgcgacggcctcaagcccgtgcagcgccgcatcatctaccagatgggcgagatgaacctgacgcccgaccgcccgtacatgaaatcggcccgcgtggtgggcgaggtgatgggcaagctccacccccacggcgattcggccatctacgaggcgatggtgcgtctcgcgcagccgttcgcgatgcgtctcgcgctggtggacggccatggcaatttcggctcgctggacgacggcccggccgcctcccggtacaccgaggcccgtctggcgcccgcggcgctgggcatgaacgccgacatcgacgaggacaccgtcgatttcacgccgaactacgacaacaagctcaaggagccgaccgtgctgccggccgcgatccccaacctgctggtcaacggcggttcgggcatcgctgtcggcatggccacgaacatggcgacccacaatctcggcgaggtcgtcgcggccgcgaagcacctgatggcgcatcccgacgccacgctggaggagctcatgcgctacgtgccgggccccgattggccgggtggcggcatcatcatcgggcgaaacggcatccgcgaagcgtacgagaccggccgcggcacactcaccacgcggtcgatgacgcatttcgagaacgtgacggcgcgcaagaaggccatcgtggtcaccgagctgccgttcatggtcggccccgaacgggtgctggaacgcatttccgaaggggtgaagaaccgcaagctggagggaatctccggcgccatcgacctgaccgaccgccataacggcaccaggctggtcatcgagatcaagaccggtttcgacccgaacgccgtgctcgcgcagctgttccgacacacgccgctgcaggacaatttcacgatgaacaacgtcgcgctggtggatggccgaccccacaccatgggtctcaaggagatgctgcaggtgtggatcgaccaccgccgcatcgtggtgcgccggcgcagcgaattccgccgccggaaggcgcttgagcgcctgcacctggtcgagggcctgctgctggccatgatcgacatcgacgaggtcatccaggtcatccgcacctcggatgacgccgacgccgcgaagtcgcggctgatcgcggtcttcgaccttgacgacgtgcaggcgcagtacatccttgacctgcgccttcgccggctcacacgcatgagccgcatcgagctggaggcggagcgcgacgacctcaagcggcgtatcgaggagctggagcgcatactggcctccgcgcaggaactggaccgcgtggtcgtcgacgaaatggatcaggcggttgccgaatacgggacgcctcgccgtaccgtgctgctggacgaggccgaggacggcacgctgacgccggtgacccctcatggagacgacagcgtgaacgcggccgcgatgaaggccgccgcagccgcagccaccctgtcgtcggccgaagcggacgtggccgccgcggccgcggccaggaaggccggcgaggatgccgcggcagtcgcggcgctgcaaatcgacgacgagccgtgcacggtgatgctcggcgcgtccggcacgatagcgcgctccaccccggccgcattggatgcctgggagtcgcggtcgacgagcgacggacgtacgaaggacgaccacatcgtgtccatcttccgcaccaccacacggtcctcgtacggactggtcacgtccgccgggcgtctggtgctggcccatgtggtcgaattgcccgcgctcgccgcatcgccgcagacgaacgtcgccggcggcataccggccgacgagctgatcggcatgaccgaaagcaccgatccgattcccggcgagcatgtcgtcgccgccatccccatggatcagcgcgacgacgacggcccgacccccgctcccctggccatcggcacacgggccggcgtggtgaaacgctggaaccgcgaggcccccaccacgatggactcctggagcgtcatcgacctcaaggacggcgactccgtgctgttcgccgccgacgcggcggacgaagaccgcctcgtgttcgtcgcgtccgactcctcgctgctgacgttcgatgccgggaacgtgcgcccacagggtcgcaccgccggcggcatggcgggaatccgtctggctgagggatgcacggcgatcacgttcaacgtggtgcccgcaggcaagatcgcgtggacgtacgaagagggcgacaacggcatgttctccgcgtccggagccgtcgtgctgacggtcgccggagacaaggacgcgctgcccggcaccgaaaacggtgcggccaaggtgacgccgttggagatgtacccgaccaagggccgcggcaccggcggagtgaggtcgcagcgtttcctcaagggccagaacaccctgatcttcgcccacgtcggcatgtacccgctgcacgcctccaccgagggaggctcgccggtggagctgcccaagcccgacatgcgccgcgacgcatccggtgtcgatctggccgcgcctgtcgccttctgcggatgaggctgtttcggggccggtgccttcagcgagcatcgtcccacacacacctgtggggcgtagggggggtgccgtccacgtttcggcagacgcgcagttcctgcaggcgcgcaatatcagatggcacgccgtgtcggatgatgcgcaatgccggatggcgtacctcacgcatagatacgccggtgacctagcgctggcggcggaacatatcggagaccggcggcggctgtcagcagtagagcctcatgccttggggtacggggacgaatcccgcgacgtgcaatatgcgcgaccactcgcctcgcgcagtcaatggctcgtcgttggcatcacagaaggtgacacccccgcgaatacccccgtcacgcaggtttcgctgcaatgcgtaggcgagctcgttgcaggcctgctgcaatgcgggatccgcatcctgcgcgagcaacagatgatggcttcggggcaccgcgtatgccagcaatcgtccgccccggagcacgaccgatgcgccggagcgccgtgccggcctgatcgaaaacccgcctatcgttcgtggccatgcgatgacgcttccgtacaggttggcggggtcggtggcgtccaacacgaccgcggagggttccgccgcgcatgcccgcagcgcatccacggtctgacgcgacgcgaactgtgcggcaccgcatccgctgacgaacatgccgcgcatcaatgcgccatgctcttccatgcgtctgagcaccggatacaggcccgagaatccgccgtccagacgttccttgtcgatcatgggcggagctatgacgccgtaacggtccagcaacgcctcaacccgcgcgatggcgacccgctccgcggacgcctcctgcatatctgcatgaggcacggcggaccatagtcccgtcatgttcgccgggacactgaccctgacccgcaccctgcgccgtgatgcacgggctggggccttcaccgcatgggatgacgctccgagggatctcagcggatcgaacgagctgttggtgaccttcccctgccagaccagcgaccatagggcctcctcgaactgggagtcggaccatgggtggggcaatatctcgccggtggattcgtccacgcattccgacgacgcgtcccatgccgcgcgcgtcagccctgcgagctgattcgcatgatatgccccgcccggtgccagcacggccatcaccgcatccggcagcgtgaccggctccccgggggcttcgccgttcttctccccatcctgcactgtcagaagcagggagtccgccggatgcaatgcgacgagtcctggttccttcgccttgctgccggtggtcttggaacccacccagacgatctcgccggaggagagcaggccgtcgagcatcgccggacgatagtcgcgcacccgtgccggcaatacggacgattcccataccgagggaggcagggcgatgccttccagctgctcaatgacacgcatcaccccgtcttcgccgtcatatcgttcgccgcccaccggcccgacaccttgcagcccgataaggaatgtctggtattcgctcaattcgacgggcttggtctcggctctggccttggccagcgacttggcccggatgcgtcggaacacctccttgtgcagccatgcctttcctccgtcctcggcggcgatgccgtcaaggacctctcctcgtgctttgagcatgtccaaggcgtgcaccgcgccggccgcgtcgatcgacaggtccgtcatcatccgttcgacggtgaaaggcccgtgcgtcttggcgtatcttgcgacccggccatcgatgtcatcgtccggcagctcgttccagaacgtcctgcgccccagctcctcctcgacctcatgcacggcccgaggatccatgatcgccgagaaatcggcctgccccagcagccgttccagcacatcgggatcgatcgacagcagttgcgccgatcgttccgcctgaggcacgtcgtactggtacatgacggtgcccacatagccgaacagcaggttctcggcgaatggggacgcaatgtcggtcgtcacatcgaccagaccgatgtttcccgactgaatgtccgtcatgatgcgacgcaacgcgggcatgtcgtaatcgtcctgcaggcattcgcgggcggtttccagcagcagcgggaaattgcgtttcagccgcgcggcgttcaacagttgcgtggcacgcagtctctgctgccatagcggcacgcgcctgccgggatcagttctggggaggaacagcgagcgtgcggcgcattccctgaaccgggccgcgaacagcaccgtctcccccacctgcgtctcgatcatgcgctgcatgtcgtcagggtcgaacctgatgagatccgggacatcgatgtcatgctcctgggcgggaagcctcaggacgatgccgtcatcggcggcgtatgcctggccgtcgaatccataacgctgcttgagacgcgcggtgattgccatcgcccatggctcatgcacgcgacggccatatcgggaatggatgatgacccgccagtccccctcgtcgtcggggcaacgttcgaccaccatgcggcggtcatccggcacgacgccggtggccttcctctgctccgccagcagtcgggcgaggttttccacggcgttgtcgtccagcccgtcatcgtgcaggcggtctgccgtggcggtgtcgaaccgtggatggcccgcttctgcggcatccgtcagccccgtgcagacctgccggatgaaagcgccttcggccgtaccgaacccgcagtccctgccgctgccgtccccatgccagaacggcagacgggccgtcctgcccggtgccggggtgacgatcacgcggtcgcgggtgatctcctgaatctgccatgtggatgtacccagggtgatgatgtcgccgacacgggactcgtacaccatttcctcgtcgagttcccccactcttcgaggccctttgcccccatccgtctcgggcagcaccacggtgtacagtccgcgatctggaatcgtgccgccgctggtcacggcgagccgctgcgccccggggcgggcggagatcaggtcctcatcatggttccacatcaggcagggacggaaggcggagaagtcctcgctgtcgtaggcccccgtcatcatgcccatcaccgagtcgaatgtgccgcggtcgaggtcgcggaagggtgccgacctgcataccgtcgcataccagtcgtccggcctgaggtcctccatcgatgcggccgcgacggtctgttgggcgagcacatccagcgggttgcggatcaccgatatcggttcgatgtcgccggcccgcatgctttccacgctcgccgccgccccgatgatctgctcccgggtcagagggtagatcagcgcgtgggacacccctccgacacgatgatccgcgcgtccgatgcgctgcaatcctgacgataccgacaacggaggcgatatctgtatcaccagatccaccgaccccatgtcgatgcccaattccaggctgctggtggccaccacgcaacgcagcaggccatgtttgagctgttcctcgatccgcttgcgccgctccttggacaccgacccgtgatgggccatcgcgatgacgtccccgtcatcgtgagaccgaaccagcatcgtcgtggagccgaccacgggatcgtaatgccgggaaaacccactgcgcccctccggtgactgcgtctgcgcggcatcggtgccatgatcctgtgcatacaggtcgttgagcctggcggtgagcttctccgccaggcccctcgaattcacgaacaccagcgtggtgcggtgggagagcacctgatccagcacgtcccgctcgatcaccggccatatggatccgcccgcccgatcccccgcggcgccggtgatcgcctgcgaatcgtattgcgaatcctccggcgaaaccagaaccgaccgtcgatccggcgacactggcaggccacgccgttcggcgagccgtctcatggccggggtcacgccgctgatatgcggggccgatgccgccgacgcgtcgacgcctcccgcacggccgggcacattggctgattggaggtccctcatgttctccagcggctcgacgacgcgcaaatccatcgcgggcctctcctgcggattgatgacggtcacgggatggatcccgccgacgaatctcgcgacctcgtcgacaggccttaccgtggcggacaaccctatgcgctgcgtcgcatgcccggcgagcgcatccagccgttccaggctcacggccaggtgcgcgccccgtttggtgccggcgacggcatggacctcatcgagtatcaccgtttcgacgtcgcgcaggatgacgcgcgccttggacgtcagcagcagatacagcgattccggcgtcgtgacgaggatgtccggcggatgggaggcgatggcgcgtctctcccgtgtcgtcgtgtcaccgctgcgtatggcgatgccgatatcgggagcggcaaggccggacgcctcgcattcggcggcgatgccgtcgagcggagcgcggaggttcttcgcgacatcgacggccagcgccttcagcggcgagacgtacagcaccttgacacgccgagtccgacgccgctctccggaaacgtcagccgcgcccttcggagcgatcatggcaccggagccgttcagacgatccgcctctcccgtcatcaggcggtcgatggccgagaggaacgcgcataatgtcttgcccgagccggtgggcgcgaccaccagagcattgcccccggcatggatgaccggccatgcctggctctgcgccacagtaggtacatcaaacgcatgtttgaaccatgcccttgtaggacccgagaacagattcaaacattcgtacatatattcgattatgcgatgcagcctagacccacgacacaccgctcgaagacgggcgacctactcctcgacccactccagcacatcgcccggctggcactccagcgcctcgcagatgccgtcaagcgtggagaagcgtatggccttggcccgcccgttcttcagcaccgagacattcgccggcgtgatgccgacacgttccgccagcccccccaccgacattttgcgtttggcgagcatcacgtcgaggttcactcggatcgccatgtcagatcaccacctccagctcgtcgtgctgggcgatggcggccagcaacgagcgcatgaccagcatcagcagcacgaacgccgcgagcagcagcaggccgaccgcgcccagcaggaccacgcccggagcccccagcgcgacatccacataggcacccgacgccgggtcgcggtattcggcatgggcgagacctccgtacagcgtcacgaacaataccggcgccgcctccaccgccgcgcatgcgatgatcgcatcgacccagcgaaccgcgcggccggaaaacacgtcaagccggtccaccaacgtcagcagattccacagcggcaccatcgccgcctcgacgcacgccacgcccagtatgcccgcgacggcatacacccaacgcgacggagcgaattccgggttggcctgcacgacgtcgcccgacaccacgaccatggcgcattgccccgccgcggaagcgccgatcccccacatgcagtacagccagctcatgtgacgactcgcgtaatggatcgccacacagttgttcagcgccgcatcgacgccgcctgcgcccaatccgtgggagggggcggcgagcagaaaattggccatgattctcccggtattacccagtggtatgtacgttcgtacacatgctaggcgaaccgcaggatatccgttctcgcaggccgaacgagcgctccggtccgccgcgctccggacccgttcacggacgcatggtcattcgcgctcagcgcaaccatagcgtttctcgaataaaaacgagatgattgacccggaaaacctgaacgagaaaaggcggcaacatggtcggcaatgacacgatacacacggtcacgcgtaaggagcacgactgcatcggctacatggatgtgccgaaagacgtgtattggggcatccatacgcagcgggcgctcggtaacttcaccgtctcccgaatcgcggactccacccatccccagctgatgcgggcctatgcgaccgtcaaacgcgcctgtgccgaagccaacgacgagctcggactgatcgaccacgacaaggcacggctcatcgtcgccgcatgccgcgacatcgagaacggcgagctcgccgaccagttcccggtcgacgtgctgcagggcggcgccggcacatcgacgaacatgaatatgaacgaggtcatcgccaatcgggcgttggagctcggcgggcattccaaaggcgattatgggttcatccacccgaacgacgacgtgaaccattcgcaatcgaccaacgacacctaccccgcggcctgcaagctcgcgctgatcgacgccatcgggccgctcgcggaagagacgaagaaactcacgcgggcgttccacgacctcgccgacaagcacacgaacgacgtcaccatcggacgcacccagctgcaggatgcggtgccgatgacctacggtcaggaattccacgcattcgcaagcttcctgaaaagcgacctcctggccctcgaacacgtcgtcccgcaactgaccacgctgaacctcggcgccaccgccatcggcaccggcatctgcgccgacctgcggttccgcacgaccgccacacgccatctggccgccatcaccgggctgcccatcaccgcggcgtcggatcccgtggcggccatgaccgatatgagcggatacatcgccacgtcgcagacagtcaagaacctcgccatacacctgaaaaaggccgccgacgacctgcgactgctcaattccggcccgcataccggattcgacgacctcaacgtgccggcacggcaggcgggcagcagcatcatgcccggcaaggtgaacccggtcatccccgaatgcgtgaaccaatgctgcttcatggtgttcggcatggacacgaccgtcacatgggccgcatccgaagggcaattgcagctcaacgccttcgacccggtgatcatccacgaactgctcaacggcatcgagctgctgacccgcgcgatggcgatgttccgcgagcgctgcgtgtccggcatcaccatcaacgcctcgatggggcgccgctacgccgaatactccccgtcgatcgccgccgcactgaacggcgccatcggatacgaacacgcggccgacatcgcccaggaagcggccaacgacaatcgcaccgtgcgcgatgtcgccggcgagcgcaccgacctgcccgcgtcgacgctcgacgagctgctcgacccgatcgccctgtcgcgccgcctcggccagacctgccgggagcatcagtagacggatatcggctcgggccgccgccggcctgatacaagccgacggcggcccgggcagtgcacagccggcagaaagccggatcaggtgtcgatcttggagcggtcgaaatcgtcggcgttgtcgacgatgaacgccttgcgcggcggcacatcgtcgcccatgagcaggctgaatatctcggacgcctgtgccgcatcctccatgcggatgcgccgcagcatgcgcgtacgcggatccatcgtcgtgtccgcgagctggtcggcgtccatctcacccagacccttgtagcgctggatgtcgggattgtacgagatgtgtcgccgttcgagatccgccagacggccggcgagctcgtcatcggagtacgtgtagatgaactcgcccttgtgcgagccggcgagcgcgatgcgatgcagcggcggcacggcggcgtagacgtacccgtgctcgatgagcgggcgcatgtaccggtagaacagcgtgagcagcaggatgcggatatgggcgccgtccacgtcggcatcggtcatcatgatgaccttgtggtagcgggactgctcgatgtcgaaaccggcgccggatcccgcaccgaccacctggatgatcgcggcgcattccttgttgttgagcatctggctcaacgatgccttctgcacgttgagtatcttgcctcggatcggcagcagcgcctggaatccggaattgcgcgcagccttggccgtgccgagcgcggagtcgccctcgacgatgaacagctcggccacatcgtcgttgcccggctggcagtcggacagtttcgacggcatggcggcggattcgagcgcgttcttgcggcgcgtgacctccttggtcttgcgcgcctggatgcgggcgtgcatctcgccgacaatcttctccagcacacgaccggactgctccttgtagccgcgtttggagcccgtgatcatctcgccgaactgcttgtcggtcatcctggtgacgatgggcttgacgggagcggtgccgagcacgtccttggtctgcccctggaactgcggctcggcgatgcgcacggtgacgacggccacgagtccggccaggatgtcgtcgcgctcgacgcgcatgttcgagtccttgaggttcaccttgagtttgcgggcgttgtcttcaacggccttgcggatctgcttggtgagccccatgaggaaaccgtcgacgtgcatgccgccgccgggcgtctcgaccacgttgacgaagctgcgcatcgtcgtgtcgtacccgttggtccaccgcattgcgatgtcgacgccgcatttgcgggtaactttctgggcgtgcagttcgccgccctcgccgaccgcctgggtctcctcctcgtaggtgtcctcgccggtgatgcgccagatgtcggataccgcctctcccgcggacaggaaatcgacgaagtccttgacaccgccggtgtggcggaattcctcgacgcgggcgtgcgtgtggcgggccgcgtccaccttcgccgtctcggccgcggcggagactgcggcagatcgcgcttcggcttcacccgcttcaacggtatcttcgacggccgtgtcggccgcagaggcgatgtcggcagcgtccatcagaccggttccatcgtcggcgggcgtctgtgcggcgtcgacttccatcatctcgtcgacgctgtcgtcgccggtttccggcacgttctcgtcgatgacggtgatccgcagtcccggcaccaggaaactggtctggcgcacacggtcgatgagctgctcgtagctgaattcggcggtgtcgttgaagatttcgggatcggcccagtaccggatgcgcgtgcccgtggtcttcgggctgaccttgccgatgatctccagctcggtcgggcggttcttgcgggtgcgcttgaacggcgcgtccggggacggatgctcgggatcggtgtcggaatatacgccgggatgaccctggtggaaggccatgtgatgggttttgccgtcgcggtcgacctcgacgtccagacgcgagctcagcgcgttgacgacggacgagccgacgccgtgcaggccgccggccgcgttataggacgcgttgccgaacttcgcgccggcatgcagcttggtcagcacgacctcgacgccggtgagcttggtcttcggctcgacgtcgacggggatgccacggccgttgtcggccacttccacggagccgtcgtcgtgcagggtcaccgtgatatggtcgcaggcgcccgcaagcgcctcgtccaccgcgttgtcgatgatctcccacaggcagtgcatcagaccctggctgtcggtggtgccgatgtacatgccggggcgcttgcgcaccgcgtccaagccttcgagcacggtaaggctgtcggcaccgtattcctgtttgggcatacaaatcctattttctgtataactcgcggctctcctcatcgaggggagctatcaacggatggctccgtcgggggggggggacagtccactggaccgcccctcctcgcgtgatcgcgctgccgagcggcgcgatcactgatcgaggaagtcgcgcagggtctgggagcgcgacgggtggcgcagcttcgacatcgtcttggactctatctggcggatacgctcacgggtcacgccgtacacgcggccgatatcgtccagcgtcttgggctggccgtcctccaaaccgtaacgcatcttgatgacgccggcctcgcgggggctcagagtctccagcacctgcttgaactgctcctgcagcagcgagaacgcgaccgcgtcggacggcgcgatggcgtcggtgtcctcgatgaggtcgccgaactcggaatcgccgtcctcgcccagcggcgtgtgcagcgagatcggctcgcggccgtacttctgcacctcctgcaccttctcgaccggcatgtcgagctcgcgggccagctcgtccggcgtgggctcgcggcccaggtcctgcagcatctggcgctgaacgcgcgacagcttgttgatgacctcgaccatgtgcacgggcacgcggatggtgcgtgcctgatcggccatggcgcgggtgatggcctgacggatccaccacgtggcataggtggagaacttgaagcccttcttccagtcgaacttctcgacggctcggatgaggcccaggttgccttcctgaatcaggtcaaggaagagcatgccacggccggtgtagcgcttggccagcgacaccacgagtcgcaggttcgcctccagcaggtggtccttggccttcttgccatcgttcgccgcccacttgagctcgcgcttgcgcttgaagtccatgccgtcgctctcggtatcgagcagatgctgggcgtacaggccggcctcgatgcgctcggagaggtccacctcctgctcggcgttcagcaggctgacacggccaatctgcttgagatagtccttgaccggatccgctgtggcgcccgcagcgatgacgcggcgcttcggattgcccgacggggtcaggttctcgtcgtcgtcatcgtcgcgcaccacgaacgcgcccttctccttgggctgttcaggctccttgcgcccgggttcggtcccctcgtcgtcctcttcgtcctcgggaacgtcgtcatcctcaccggattcgtcatcgatgtcatcatcgtcgccatccagaccgccgtcatcgacgtcgtcgagatcgtcgtcaaggctctccagaccatcctcatcgacctggacgtcgtcgagatcgtccgaggaatcctcgttggcgagttcctcggtcttcgccatctcctcggtctcgtccttgacggccttcgccgacttggacgcggcgcgcttgcgggtgggcttcgcgggcgcggctgccttcgccgaggacttgcgtgccgtggacttggacgcggcggacctcgacgaggtcttcttgcccgcggcggatttcctgcccgctgcggtcttcttgtctgccgtagaggccgtacgcgcggcggttcccttcttctcggatttcgtcttggcgtccgtatcgtccgggactgtcgtcgccatcgtatccttcgtggccaaactcatcctcctgcatcatcatgccaagcgtgcttataccacatcgggcgcacttctggcaagagcaaatcgtcaactatgcgagttaaccatcttccaaggacgattattcccacggcttgttgcggcgtggaaccgatggtctcccgcgcgccgtcatgcggcgtcgtgatgcgggccggcacccatccacgccggcatcacgccgcgctggtacgccgagcacacgatcgccgccagagaacagtcctcatccagcatcaggcagcgcaacgcgaacgccaccgctcgactgtcgcccatccaccacatcacatacgccagcacggccagcggctgtacgctgaagctctccggaacgcgatcggccatggccacgagcatgtcggcgccggcccggcatctcggttcgtcgggccgacgtcgctcgtcgaaaaacgcgccctgcagctccctgcacatgcggctctgcacatccggcgcatgcgagcgcgacgcgaaatccatcatcgtgcgcttgtcggcgcaggtgtccccggccaccaatgacatgatcagggcatccctgatcgacaacgtcaccgtcattcccaccaccagcgcggcgatcgaggcgtcatcgatggcccgcggctgcgccgacaggcccgccagccaatggtcgaacggctcatcggcccattgcgcgtccgccgccacggtgccgctgagcttgcggcgctcgcagtattcatcgcgcatacgtctgagatcgtcctcgcgcagcatgtcatcgtccgcgaccgcctccgcataccggacggcctgcgtgttcggctcctgtcccatatcgtggtcccccttaccggtctcatccaccgccggcgcacgatgccggcgaccgccgcccccgcgacgggataccatcaactatgccgtatcgggccggttttcagggcgaaatccaacctatgtggtcgaaggcttgtcaggcttgcaaatccgcggttcttgtattcgtaaaaccctgtggataacctctaggtatgactgtttcatctgatttggccctgatcgagtcccgcatcgccgacgcggtggaccgtttcatggcgctcgacgccgacgacaccatcgaaggcccgtgcctgaccatatcccgcgaggtcgcgcgtcaggccctggtctccagcgaaggcggcaagcggctcagggcgttgctggccctccacgccttcgacgcgaccgacccgcaggggcatgacgacgatgacgcccatgcccgcggacgcgacgcggtgctcgacctggcctgcgcgatagaggtcttccagaccgccgcgctcgtccatgacgacatcatcgacgactccgacctgcgacggggcaaaccagcggcccacaaggcgctcggcacgacgtcgcacagcgcgtcgctcggtcgaggactgggcatcatgctgggagacctgctcgccaccgccagcgtcgacatcgcccatgccgcggcgcagcggatgccccggcccgacatgatcgtctcgacgttcctgcgcatgcaccgcgaggtggagatcgggcaggtgctcgacctcgcagttgagttgtctccattggacgagccggaacggctcgcacgggaatccatgaacgtgttccgatggaagaccgccagctacacgaccatcgcgcccctcgaattcgcgcttctcgcctccggccgagaccccaggcgggcacatgccgacgccatggccatcggactgccgctcggccaggcgttccagctcgccgacgacctgctggacgtcatcggatccagcagatccaccggcaagcccgtgggaggcgacatcagggagggcaagcgcaccgtgctgctcgcggacgcgatcagcggcgccgaccagaggcagcgccgcacactgatcgacatgttctcgtcgcagtcgcggggcgacgacgacgtacgccggtgcatcgagctgttcgaaggcaccggcgccatcgaccgatcccgccggcgcatccgcgcactgtggcagagcacgcttcatgccataggggacctgcggctcccaccgcaggacgagcgcacgctcaccgaggcatgcatgaggttcatcccgatcatcaaagcgtagagttttcgccaatgtatgtattggaaacgccgtttttcagcagaaagaaccttacgatacaaccatgagtgaagtcgcagccacgtcgcaagagccgcagggacgaatgatagaggggcgataccgcgtcatacgcaaaatcgccgaaggcggcatggcgaccgtgtacgaggcggaggataccaggctcgaacgccgcgtcgccatcaagatcatgcacatgcagctggcgcagggagcgcaccgcgagcagttcgtggaacggttccaccgcgaggccaagtccgccgcggcgatcgcgaacccacatatcgtgcaggtgtatgacaccggcgaattcaatgggctggactatctggtcatggaatacgtgcatggcgtgaacctgcgtcacgacatgaacctgcagggcacgttcagcgtgcgcgagatgctgcgcgtcatctccgagacgctggacggactagcagcggcgcaccgcgtgggcgtcgtccaccgcgacatcaagcccgagaacatcctgatcaacgaccgcgggcacgtgcagatcaccgatttcggcctggcgaaggccgcgtcgcagacgacactgtcgaccaccggcatgctgctcggcaccgccgcgtatctggcgcctgaaatgatcgaggacaacaaggcgaccatgcagggagacctgtattccgtgggaatcatggcttgggagatgctcgccggcgacgtgccgttcacgtcggacaatcccgtcaccatggtgttcaagcacgtgcatgaggacgtgccgtccctgacctcgacctgcccgggcatcaaccagcaggtcgccgatttcgtctcgcatttgaccgcccgcgccgtcgaggcacggcccgccgacgcatccgacgccctgcatgagctgcaacagctgaccgcgaacctgccgatggacgcatggcagtaccgcaagcccgccgacgtaggcaccggcggcgataccgaggagccgaccgcccccgcgctggtgggcgccatcccggccccgcccgcgccgccgctgttcgattcgcgcaccggcaccgcgccgcagaccggcaccgaccctgccacggcccgtacttcggtgatgcctgaaggcaccgcaccccaagacgtctccgccacccaggtaatcacgccgcaggatcccacactcaccatcgggctgatggacgcgcgcccgctcgatgaccaaggctcggagcccgccaagcgcaagcgctcgaagaaacccttgatcatcatgctcgtggtggtgctcgtcgtggcgctcgtcgccggtgcaggcggctcatggtggtatttcctcggcccgggcagctactggacgctgccgcagcccaccgacatctcctgcaagaagaacaccgaatgctccatcgtcggggcgaagtggagcgattaccagagcacgctgaacgtagcgaacatcccgttcacctcctccgaggcgtacagcgacaccgtcgccaaggggaacatcatctccgccgacccgcagaacgtcggcgcccatatcagcaagcgccacaacggacgcatcacggtgacggtgtcgcttggcgtcaagcaggcgaccatccccagcgacatcgcggatccgacgtcggccgatggcaaggatccgatcaaagcgcttgagaacgccggattcaccaacatcaaacgcgatgactcctcagccgaatattcgatgacgctgccggagggagccctgcaaagcatttccgagacgcccggctcgaccctggaccacaacgccgagatcaccgtggtactgtccaagggactcatgccggtcaccatgccggacatcgtcggcaagaccaaggacgaggccatgaccgccctcgacaacgcgaagctcaagaccaccgtttcggaggagtacagcgacagcgtcaagtccggcagtgtcatctccgcctcgcccgactccggtaccgaactgcattggggcgactccgtgaagctgaccgtatccaaggggcccgagaccgcggacgtgccgaacctcgtcggcaagagcaagagcgacgccatcaagacgctggaatccctcggtttcgaagtcaagaccggcggcttgaacatcctcggcctggtgcagcagcagagcgccaccggcaagacgaggctgcgcgacacgaacggcaacaagaccgtcatcacgctcaccgtcgtgtgacggcggcgcgccggcatataccggcatatacgcgaagcggctccccctctatcagtttgagagggggagccgcttcgttcgcgttcgggatcgtcggtcagtggccttcgccggcggttgcggcttcggcctcctgccgggccttgagctccgccttgaccttctgggcgtactcgtccacgtattcctgtccgctgagctttcggatctcgctgacgagatggtcggtgagcgcccgcacctcctcatgggtgatctcgtcggcgtccttgcgatccaccgggatgggcttgccgtatatcaccttcgtcttgcccttcgacgggatgacctgaccgggatgctgtatctcgcgcgttcccaccaacgcggtcggcaccagcgggcagccggtctccagagcaaggcgcgcggcaccggtgtggccccggtacagtcgcccgtcaggactgcgcgtgccctccacgtggatgccgaacaggtggccttcctcaaggatctcacgggcgtgggccaacgcgcccagcgacttcgagccgccggaacggtccacggggaacactcccaccgacgtgaaccaccatttcttgaaccggcccttgatgcccttgccttcgaaatactcggccttgcccatgaaatgcaccatgcgcgggcaggtgatgggtatcagcgcatcgtcgatgaccgccagatggttcgcggcgatgatggcaccgccttcacgcggcacgttctccagtccgatcgccgtcggtcccatacgacgacgggcaatccaaccgaaacctttgacaaagaaccagtacagcacgatgacacctcccaagtttggccgtccgcctgattacagtaggacggtatgaccgatcatcacgatagcaaccacaacgataccaacgcgggtgaagaacatccaaacaccacgccgcgcgccggacatgacgggtatgacacaggctccaatgccggcgacgatctcgactgggccgccttcgccgcggagcatgccaacgacctgcaggacgtcgagcgctcacgcaacgcgcggcgcttcgagaagcatgcgcagcgcaaggagaaggaggcgctgctgtcggtcgacgatctggacgccggcacgttcaccgatgacaaggtgccgctgcaccagcgcggcccccgcgaccatggcggccgcagctggctcgataccgatgacgtcatggacgagtacggcgatgacttcgtgccgccgaacccgaaaatcggccgcgtgaacgcctcgaagctggtgttctggatcctgctggtcgcaggcgtcgcgggtatcatcgcatccgtgttcgtacccgccctggcgacgttcctgggctccatattcggtctgtgcgcgctggtcggcggcgccggcctcatcctccaacacaaggggcacaccgagacacgcaccgacatgttcgacgacggcgcgcggatatgacgacggtgcccgtcctcatcggacgggcaccgcaatgatcaggccttggacttggcggtctcgatccacttgccgaacagggccgcggccttgccggaatcgacggtgttctcggcgagcgcatacgcctcacggaaccgctcggcgagtgtgccgtcgccgaccaggttgccgtctgccacgatggcggacgcagcgttgagcaacgcggtggtgcgtgacgggatgtccttgccggccaagaagtccgtgaacgcggcggcgttcacatcgggttcgccgcccttgagctgctcgacggagatcttggcaagatccagatccagggtcgggtcgaaatcggtttcggtgaccttgccgtcgcgaatctcccacacggagatcgggccggtgggagcaagctcgtcgaggccctcgtgcgaggtgtagaccaggccggactggccgcggctggcgtacacggcggccatgatcggactcaccttgcggttggcgcagccgatggccacgtgcgccggattggccgggttggtcaacggtcccaggatgttgaacacgcacgggatgccgagcgcggcgcgaatcgggccaacaaagcgcatggccgggtggaaggtgcgggcgaacgcaaaggtgatgcctacctcgtcgccgatctccccgaccgcctcgggcttcagatccatcggcaggccgagatcctcgagcacgtcggcggctccgcacttcgaggaggcggcgcggttgccatgcttgacgatcttcacgcccgctgcagctgcggccacggaacccatcgtggataggttcacggtggcgaagccgtcaccgccggttccgacgatgtcggtggtctcaccggacacgttgagcggcacggcgtgggagaccatggcctttgcggcgccacacacctcgtcggcggtcagtcccagctgctcctgcatggcgagcgcggcacccacggcggccggatcggcgttgccctgcatcaggtcgtcgacgaaccactccgattcctcagcgctcaggtggtctcccccgaccagcttggtgagaatcgacttccatgtgatctcggccatgatgccctccttggcgtttcgtcacgccgtgtgatatgtattcgtcgcctcattgtaatggcttgtcgtttcgtcgcccgtaatcttccatattgcaaaacatcatcggctcccgtcagcgggagccacttacttgtccggtccgggcagcgtgccgacaatcagggcaggcaacgcggcaggcatcgccgcgatgccgctacgggagtcccgactgaaacgttatgcagtatcccaaggctttgccgggcaatggatcggaatcgctgcagggtcaatgagatcgtcgcgtgcgtaccaggcctttgcactgatgggcaccgaatatggcggacaacgcacgcatatatcgattgatgcgcgcgttgtcctgagacgatatcgggaaccccagatagcggcattttacaaacggtagaattccaacgatttcgcgatttgcgtcgtgggataacgcacgcgtcaaccgattgatgcacgcgttgtcctgcggtatcgctgtacaacacgcgcgaatccatcaaaatcgtgcgttgtacagcgaatgaggctcggcgaacctcgattccgcggccccgcgaataatcgacgggctcaacccgcggacaagcccttcctctcccccgaaaacgcaagtggctcccctcacatcgaggggagccacttactcgtccagtccggagagcctatctcactcttcgttctggccgtggcacatcttgtacttgcgaccggaaccgcacgggcactgcgcgttcttggacgtgccggggaacgtacggccgtcggaccacggggtcttcagctcctcgttcttcgggcgcttgttggcgggcaccttgccttcggcatggctgatcggagccgggccggtgatcggcgcagtggcctcgcctgcagtggattccttggcggactgggcgatggcgaccttctcggcggattcctccgcagtctcagcctcatcggcgtcctcgaccttgtcgacttcggagctcgcggcaccgacggcctcttcggcctcatcaacggcggcgtcatcggactcgatgccggcttcctcgctcctggacacctgctgcacgtcgacgtggaagagcagctggacggactcctccttgatcgcctcgatcatggagttgtacatctggtaaccttcgcgctggtactcgaccagcgggtcgcgctgacccatgccgcgcaggccgatgccatccttgaggtagtccatctcgtacaggtgctcacgccacttgcgatcaagcacggcgaggaccacgcggcgttccagctggcgcaggccttcctcaccgaccttctcctcaagttcggcgtactcctccctggcctgatcgacgagggagtcgcgcacggccgcaacggccttgtcgcccttgagcttgtcggcggcgttcttggcggcgtcctggtcaagctcgaacgggaacacggtcttgagggccttgaacaggccgtcccaatcccagtcggagggcttgctggaacccttctgggcacccttgatgtagctgtcgatggtatcggcgatgaagcgctcgatatcaccgtgaatgtcctcgcccttaagcaccgcctgacgctcggagtagatgaccgtacgttgcttgttcatcacgtcgtcgtacttgaggacgttcttacggatttcgaagttgcgcgcctcgacggtcttctgcgcggtgcgcacgcccttcgacacgcttttcgcctcgatcggctcgccttccggcatgcccttggccatgacgcgggcgacgagctgcgtgttgaacagacgcatcaggtcatcttccagcgacaggtagaagcgggactcgccaggatcgccctgacggccggaacggccgcgcagctggttgtcgatacggcgggattcgtggcgctcggtgccgagcacgtacagaccaccaagctcgacgacctcctcatgctcgtccttgacctgctccttgacctcggccaaggtgcccggccagcgcttctcgtactcgtccggcgtgtcctcgggggaatagccctcggacttgagcttctggtcggccaggaactcgacgttgccgccgagcatgatatcggtaccacgaccggccatattggtggcgacggtgacggcgcccttgcggccggcgaccgcgacgaccttggcctcgctggcgtgctgcttcgcgttgagcacctgatggtcgatgcccgccacgtcgagcagcgaggagacgacctcggaggactcgacggatgcggtacccagcagcaccggttggcccttggcgtggcgcttggcgacgtccttgacgatggcggccagcttctccttcttggtgcggaagatgaggtcgtcctgatccttgcggatcatcggcttgttcgtcgggatcggcagcacgcccagcttgtaggtgcccatgaactcagcggcctcggtctcggcggtaccggtcatgccggcgagcttgtcgtacatgcggaagtagttctgcagggtgatcgtggcgaaggtctggttctcggccttgatctccacgttctccttggcttccagcgcctggtgcagaccctcgttgtaacggcggcccggcaggatacggccggtgtgctcgtcgacgatcagaacctcgccgtgggtgacgacgtagtcgcggtcacgcaggaagagttccttggccttgatggcgttgttgaggtagccgatgagtgcggtgttgctcggctcgtacaggttgtcgatgccgaggaagtcctcgaccttggtgatgcccgggtcgagcacgccgacgaccttcttcttctcgtcgacctcatagtcctcgtcgcgggtcagcttcggcacgagacgcgcgaactggcggtaccaacgggtcacgtcgccctcggccgggccggagatgatcagaggggtacgggcctcatcgatgaggatggagtcgacctcatcgacgatggcgtaatggtggccgcgctgcaccagatcggccttctcccacgccatgttgtcgcgcaggtagtcgaagccgaactcgttgttggtgccgtaggtgatgtcggcgttgtactgcttgcggcgctccgccggcttctggtcggtgatgatgcagccgacgttcatgccgaggaagcggtagatacgacccatcagctcgctctggtagcttgccaggtagtcgttgaccgtgaccacgtgcacgcccttgccttcgagtgcgttcaggtagctcgggagcgtcgcgaccagggtcttgccttcaccggtcttcatttcggcgatattgccccagtgcagggccgcgccacccatgagctgcacatcgaagtgacgctgtcccagagtgcgcttcgacacctcacggacggtggcgaacgcttcgggcatcaacttgtcaaggttctcaccgttgtccagtcgctgcttgaacttggcggtctggcctttgagttcctcgtcggacagagcggaaatctcgtcctcaagggcattcacggccttggccacgttctccagtttcttgagctggtgcccttctcccatgcggagggctttgtcaacgatatctaccacattcgctccctgtttaagctttcgtacgtcaacgagcatagcctgatgcccgacatcaggcacaaactccatccatgatatgcgaacactcggatttttgtcgttccgacccgctggacacgcccatcgatacttgtttcgtcgtgtgccgacacgcaaatatggcctgcctggatatgccgggcaggccatgtatcacgtggcggaacacttacttgttcttgatgttctccggggtgtcgatctcgaacacgccgtagctccaaccgtggcggtggtagacgacggacgggcggccggtctccttgttgacgaacaggaagaagtcgtgaccgatcagttccatctcgtacagcgcctcgtcgatgctcatcggctcggcgatgtgcagcttgcggcgaatcacgatcggcgtgtcaccgacctggacctccaccgactcgcccggaccgaggtcggaggcgacggcggcttcggggctgttgttcggctcttccggctccgcctcctcttccggttccggcggagcgaccgctcccagatcgacgggcgtcgggttgatgtacccgcggcggtgatccttgcggcggtcacgggtgcggcgcaggcgcagcgtcagcttgtcgagcgccatgtccagagcactgaactcatcggtgctggaagcctcggcgcgcaccacggtgctgcctgcgatcacggtgatctccacacgcttcgcggtgtcggcctgacgcggattcccctcatgcgtcagcacgatctgagctcgttgcgcatccggcgcgatagcggtcacacgattcatcttgctttcgacgacatcacggaacttctgcttgacttgcgtatgacgtccggtaacgacgatttccatgtggacctccctatactcaagcggtgtcacccgctatatgtgtgccgaatggcgtcatcaccacccgggtaagtttcattgtagccgaacagagggtaaacggcggggaactcgcccagagaaatacgtttcttttttcacaggttcccgtaacgttgctgtgcttatactgtgcggcttactttccttgaaggaaactgttatactttttggtctggcgacacagattgttgcgctgctggtattgctggcgctgagccgcagcatcacatcaatggaggtcgtgctctggatggtcgtcatagaggtcgtgtggtccgtgtacttcgtcgtcaccgaacgctggcacgacaagcttgcccgcaaggcaatgctgacggtataagaccattcggacagaatcgagcatgcaagcaaggccagcgatataacggtatggaatgttcgggaggtgcctgtgccagtcgagccacgattcgatcctgtgatccatgagccgatgcggctgcggatctgcggcatcctgtcgacagcggacgagatgcagttcgccgcgctgcgcgacacgctggacatcagcgacgcggcgtgctccaaacacctgaaggtgctggtcgactgcggctatgcgaccgtggagaaacgggaatccgactccagccggcacagggtgcgctggtatgcgctgacctcagcagggagagacgccttctccggccatatagcggagctcaaaagactcgcctccggactgctctgacgagtccccacggctgtcggcagctgactgtggggtggccaccacccgcatgaccatccaccggcgccacgcgccaccttccgccagcgggaggatgagcacccccaccgacagcaattcggcattcggcgttcatcgtctcgcccggtgcaccggcccaccctgattctcctgcgtaaaatccctggcctgccgtatagtagctgattcgagacccccagatggccgcggccgcgtcattcatttggcaaggctgaggaacttccgggctccgcagagcacgatggcggataacgtccgcccagggtgacctgagagatagcgcagcagagaacagaccgcccgcgcaagcgggtaagggtgaaacggcggtgtaagagaccaccggtccgctggtaacagtcggtcgcatggcaagcctcatcgggagcaaggccaagcagaagacggcaagggctgctcgcccgtgtcttcgggtaggccgctagagcctggcggcaacgtcaggtcgagatggatggccatccgcgtggcgacacgcgacagaacccggggtatcgggggtctcgcttttctttaccccccccccgaatccgcatacctggcgagttctagtgatcgttgcaacacctggcctaccgcagggaggatcaggtgaccgcgagccaccatgacgacgggacagggaccggccgctgggtgttccaggggcacggttatccgacgaggaaggcgatgtgcgaggccaggcgggccgagtacgtgcgcctgctggccgaggagggcgtgaacttcacccaggccgcccatgcggtcggggtgtcgaaacgcaccggcaaggcctggaggaacggacgcgcccgggccaccggcaggaacgagagaccatcggtggactggtatcgttccaccatggacaagcccaggaagatacacgcccgctatctgggccaggaggaacgcatcctgatcgccgaccggctgcgcctgggcgacggcatacgcgccatcgcccgcctccttgaccggaacccggccaccgtgagccgcgagatacgacgcaacacgaaccccctgaccggatgctacgagccgtaccacgcccagcaatcgagcgccgaccggctcaaacgccccaggcccaggaaagccgggccgggcacgcgcctgtggcgggagatactcgccggccttggacggcattggagtcccgagcagatcggcaaccggctcaggcatgacttccccgataatgaggacatgcacgcaagcgtcgagacgatctaccaggccatctacgtccagggcaagggcgagctgaaagccgagctgaaacgggccatgcgccagggccgcgcccaacgcaaaccccgtggcggcgcgggtcgcagaccccggttccgggatcccatggtcatgatctcggaccggcccgccgaggtcgaggaccgggccgtccccggccattgggagggtgatctgatcaccggttcggcgaacaggagcgccatcggcaccctggtcgaacgcgccaccaggttcacgatcctgctgcacctgcccgacgggcacgacgcaggccaggtccagcaggccatcgtccgcaagatgcggaacctgcccaggctcctgcgcaactcgctgacctgggaccagggttcggaactcgccctgcacaagcagatcggcgcgagcctggacatgcgggtctatttctgcgacccgcactccccgtggcagcgcggcaccaacgagaacaccaacggcctgttgcgccaatacttccccaagggcaccgacctatccaaataccccgaggactacctcgacgcggtcgccgaggaactcaacgaccggccacgcaagaccctcggctacatgaaaccaagcgagaaaatcctcgaactcctcgacaccgcaagctaacctagaaaaccaagacaacaacaccaaaaacaccaggtgttgcaaccaccactagaatccgcccctcccgccaacacattcctcccaccaatatgagggcgcgcgaacgaaacaacgcaatgccggcagccccgttccctcccgctggcgggagatggcgcgaagcgtcggagggtgttctcacgccggcaatgcggtaagaccaccggatcgacaaaccaccgggccggcaacccgccaccccgccaagccaccggggcatctcccccgcttgccccgcgctgtatctcatctaagagatagttcattgagatagttcattctaatcaaatagctcatgggctacggcacgcagggtttcggcgtcgtgccccttgcgcccgcccgaggaccagaaccggcgcttgcgcactttcgggtccatgccctgtgtcttggcggcgctgcgccgccccaactcccatgcggcgtcctcgaagacaccgctcatgcgggcctcgtcgcagacccgctccgccagcggacggtcgacccccttgcgagccagttccataaccgcaccgcggtatcccatcagacggccgacgcagtagcgcacggcggattgcgcgtacgactcatcatcgaccagaccaacctcgatcagcctgtcgaccactgcggcgaccgtctcatcgtcataccctttgtcgatcagacggtctcgcaaggcacccgatggacgatccgccgcatccagcaggcgtaatgcggactcccgacacgcatcgacatcgcagggatcctccggctcccgcccaggccgcaacatgctccgcgcggagcgccgagccgggcggttcccacgtgaccatgttccgcgtcgcggggagtcgacgcccggttcgacaaccggcgtctcacatgttccatgagcggcgaggaacgcttctgcgctgatcatgcggcaggcgatgcggcagcagcgggcgcgccatcctccggcgccgtttcaggggcatccccgtccgtcgcggactcaccgtcggccagctgatcgggcacttcgatgaggccgaattccgccttgaccttgttgccgatctcctcggtgatctgcggattgtccttgaggaacttgcgcacgttctcacggccctggccgagctggtccccgtcatacgtgaaccatgagccggacttcttgaccacgttgcactgcaatgccatgtccaggacggatccctccttggagatgccctcgccatacagcacatcgaactcggcggacttgaacggcggagccatcttgttcttgacgaccttgaccttggtgcggttgcccacggcctcctcgccgttcttgatggtctggatgcggcggatatccagacgcaccgacgcatagaatttcagcgccttgccaccggtcgtggtttcggggttgccaaagaacacgccgatcttctctcgcagctggttgatgaagatggccgtggtgccggcctgtgccagagcgccggtcatcttcctgagcgcctggctcatcagacgggcctgcagaccgacatggctgtcacccatatcgccttcgatctccgccttgggaaccagggccgcgaccgaatcgatgacgatgacgtcaagggcacccgaccggatgagcatgtccgcgatctccagcgcctgctcgccgttgtccggctgcgagacgatcagggaatcggtgtcgacacccagatgccgggcatagaccggatccagcgcgtgctcggcatcgatgaatgccgccaccccgccgttcttctgtgcgttggcgaccacatgtagcgccagcgtcgtcttgccggacgattcagggccatagatctcgacgatgcgccccttcggcagaccgccgatacccagggccagatccaacgccagcgatccggtgggaatcacctcgacgttctgctcgggcttgtcgcccaagcgcatcgcggatcccttgccgaagcttttctccacttgctccagagcggagtccaaagccgccttgcgtcggggatcgatgccgtcccccaccggcccattgcttgcggcctcacgaacagaggccttcgatgcggccttgcccgccccacccttcgaggtcgtacgctgtgccatgtcaatctccttacgttgtcatccatatgcgccatatgccacatgcatcaaccgtacggaacatacgaacaccggcgcaaacgaatccggccaatgtggtcgaaggctctccggcatccatcgatccgcaccgactcccccttactgtcgcaaggaattcgtcggcgtgtcgaaccgtgcggcgcactacgtcatatcatcgtgcactgtggataactataccccaataggcgaacacctgttcgatatcacccgttccgcgtgtctcgtcagcggaccggcatcggaggcgcgttgtgatcggagccccaacgctggggatcgggaacgtccatatggtcgcacagcacgttccataccacgcgcggctgctcccccgcagacagcgcctgcgccgcggtaagtcccgcgagcgcgtcaagatgctgatcctggaccaggctccggccatacccatgaccgaacacctcatccaccagttcccagaattcccgttctcgcatgtctcccagtctaacccggccccgccgctgcgaatgccggcataccaatcgactccacgcccccgaacacgacgaaaccgcccgccgggcctcaagcccatgcggacggttcctctcatgcacccgatacgacgatatgcatatgcacgcggcatccggcgccgcaaatcgctattcgctgatcgaatccagataatcggcgacgagccgcagcatctgcgcagtgcttacacccagtgatcccgcgatggagctcagcagttcggagcttgcctccttctgcccgcgctccacctcggacagatagcccagcgacacgccggccttctcactcacttcacgcaacgtcttgttgtcgcgggtgcgaagatcgcgcagcacatggccgatggcctcgcgcagcgacacatcctttccctcgggcagcgtctcgacgccacgcgagaccgcgcgctgacgcggttcgaaggaatcctcctccatacgcatacgattcagttccgcctgccgttcatccttggccttcttcgccgcacgcgcccgcaacacctgctgctgggcgaacaacacggcacgccgctgcgccggcgtgagatcacgcatcctggccgtacccggctgcacctgcttgacggggatgccagccgtttccatccgctcgcccgttcgggtcatcgtttccatgagaccctcctttcatatcgtccaagtgcttccactgtgttcaacaccgccggcggcggtttattcctgcatatctcctgtgaaatggctcacgatttgcacaaggctgaatacggcaccgcgacggacctcctcgcgcccacccgtcagatgaagctcgtgggcggtcacggacggcacgccgtcagggcttatggcggctggaatccgcactcccacatacaccagtcccgcgggcttgtctccatccggcccgggccccgccacgccggtggtcgacaatccgatgacacggtcagcgtattcgggctgcccgtacagcccggcgaccgacgccgccatctgtcgggccacttcgggatgcacggccccttcgcgttccaacaaaccgcggtcgacccccagaatcgacgccttggcacgaatgtcgtaggtgaccgccgacccgagaaacacgcgggatgcgcccggcacgcgcacgaacgcatcggccagcagcccgccggtcaacgactccgccgcaactatcttcacgtcatgcgcctcgcaaaaccgcagaatccgcgcggtcatgtcgtcgcaacggcacgaatcggcatcattcatcgcaatccccctccatcaaacgccatcaaacaaaaacgccgccgtgcgcaggcacgacggcgtccactcgctcagtccttgcggctcccgaacgtgttgatcagatatatcgcccccgaatacaggcacagcatcagcgcgatgtatatcagggcgtacgtcagcgtgtaatatcccgtcatccacaccggcgcggtctgggccggattgaacacccacacgggcagcagcagcatcgacaggccgatgcactggaacagcgtcttgagcttgcccggccaggcggcggcgatcaccttgccgcccttgtcgatgacgaagaagcgcatgacggtgatgcccacctcacgcagcagaaacagcgcgacgatgatccagccgagccagacgggaccgagctcgccgaacaccgcggccacgatcagagtggcgcaggtgagcagcttgtcggctatgggatccatcagcttgccgagttcggtgacctggttgtacttgcgggccatccacccgtccaccttgtcggtggacgcggcgacgatgaacagcacggccgcggcccatcgcatggggatgttgttctctccccacgagcctgcggcgatgtacaggccgaggaatatcacgaccagcacgatgcgcgaatacgtgacgaggttcggcggtgcgttccagccgtccagcagcgacttcttggcggtcgccgagcgttccgttgtatcgttttgcatatcgttttccatagtgttcacgatacccccacactcctaccttggatgaatatacggttcgagttctctgggaatcccgtcagatatggctgcatcatggccgggtcaggcctgccggtcaggccgacttggcacccactacgccaattcgccctgctgcgcggccgcggcgggcgcagaggcctgcatcgcatcggtctcgccacgaatgaacgcgagcaccgcaggcagatcctggggctggacgagtacctgacgggccttcgagccttcggacgggccgacaacgccacgcgactccagcaaatccatgagtcggccggccttggcgaagccgacgcgcagcttgcgctgcagcatcgatgtggaaccgaactgcgtggtgaccaccagctcggccgcctgcagcaacacgtccatatcgtcgccgatgtcctcatccggctcgacggccttcttctcggcctcctgcgccatctgctcgatgtcctcgcggtagtgcggcttgcgctgtgtgcgcacgaactcgacggccttgcggatctcggactcgttcacccacgatccctgcacgcggatgggtttcatcgagcccataggcaggaacagggcgtcgccctggccgatcagcgtctcggcgcccaccgaatcgaggatgactcgcgaatcggtggcggaggatgtggcgaatgccagtcgggacgggatgttcgccttgatcaggccggtgaccacgtcgaccgacgggcgctgcgtggcgagcaccaggtgcacgcccgcggcacgcgccagctgtgtgatgcgctggatcgagctttcgacgtcgttcttggcgaccatcatcaggtcggccatctcgtctacgacgacgagcaggtacgggtacggggcgaccttgcggttcgaaccggctggcgcatgcaccttgcccgcgcgcacggcttcgttgaagtccttgacgtggcggaatccgaagaactgcaggtcgtcgtagcgcgcgtccatctccttgaccacccattcgagcgcctgtgcggccttcttcggatcggtgatgatcggtgtgagcaggtgcgggatgcccgcatacgcgctcaactccacgcgcttgggatcgaccatgatcaggcgcacctgctcgggcgtggaacgcatgatgatcgacatgagcatcgaattgatgaagctcgactttccggagccggtggcgcccgccaccagcaggtgcggcatcttggtcaggtcggcggtgacgaaatggccctccacgtccttgccgacgccggcgagcatggggttcgggtcattcatcgccttgtcggagcgcagcacgtcgccgaggtggacgatctcgcggtcatcgttcgggatttcgatgccgatcgccgattttccggggatcggcgagaggatgcgcacatcggagctggccaccgcgtaggcgatgttgcgctgcaggttcgtgaccttctcgaccttgacgcccgcgccgagctcgacctcgtactgggtgacggacgggccgcgcaggaagccgacgactttcgcgtcgacgttgaactgctggaacgtggaggtcaacgcgcggatcacgcggtcattggccggcgtgcgcacggcatgaggctggccgtgcgacagcatgttcaggtcgggcagttggtacggggcgtccggcgccgcaagcgcagggtcgtccacattgggattcatgttctcgcccgcaccggccgatgcgcccgaggaggcatccggggacatggggggaatcgcaccggcagcgcccacggcgggtatcgccgcccacggatcggacgtaccggcaaccgtcgatgagaccaacctcgcactcccggccgccccggctcccccgtcgggatccgtcgcatacgccggtacgcctgaggtaccggaagatgcggcaccggggtgtgcggcggccatgccggatgtcatcgtcgcgacggcatcggcggcgtgggccgccgccacgcccccggacatggcgccggcagctgctccggccatcgcgcccatggtggaggacaccgtgcggggcatgacattgccgcgtgcgtccagtgatgtctcggcggcctgcccatgccgactcgccgcgtgggagaacgggtcatcccccgcataccggtcaagtgacgcgtcatccgtcttctccgcggacttgcgccggaacagacgggagaaccatccgcccttcgcgcccacggagtccgactcagtttcgtccgtaccgtcatgggcggggacgccctcggcgaacgccagggtctcatcgccgtcacccacacgcacctcgttggggaactgatcctgttgcgcggccgaatccggctcctgccgaggatgcagggaacgctgcgagatcatggcagcgatggtgcggacgcgatccggcacctgagtgacatgggtgcgggtgatcatcagcagcgagaacaagccgaccaccacgaagacgatgacggcgaacaccttcgacaatccccatgccaaaggcgagcccagcacgaaaccaagcagtccgccggccctttgcagcaggccgatgtcgaacgaacgcgcgtcggcggccacgaccacgtcgatgatcgagcagacggaccacaacagtatcgcccagccgctcaccacgcgggggttgtcggaattcttgccgctgttgcgcatcagacggatggccacgatcaccagcagcaccggcaacacgacgctcatcacgcccagcacgccggccgagaacgcatgcagcacccggccgatgatcccgttcacgcggaaccattcggaagcgcagaagaatatggcgagcacgatcagcaggaagcacaggccatcccggcgatacacggggtcgaattcacccactccggcaaccgaccgaaccagtgagccgaagccgcgcggaaccgcgagaatgatccgcttccacagcggctcctcgaccggggtgcgggcatcgtcccccatgccgccacgcccgccggaagctctcttcccggtctcgccgccgcgcgacgaagcacgctgcgtgcgggtgccacgcggcgagtctttggaaggaccattgcctgatgaggatgttgttcgtgccatagcgtcttcagattctacccatcacccgttattttcccgatcaattcgcgtcaaaacccgcgcgaggggcatcggcgcatgtaccatctaactatgactccagcagaacgtgcgagcgcagtcgcatttgcactcaaaaactgcgcattggaagcgatgacgccgggcgatgcgacgatgcgcgccgcggcgggatacgagcggggcgacaacgacgtatccgctctgatcgacgccgcggaccgggagacctccgggatcgtcagcggcaggctcgccgacgggagccttgacgatcatgccaccgaccacgccagcagcgtgttcgcccgaacggtgctgttggctgaacgccgttggaatccgagcggcgaccttgccgagctcatcgccatccaccggggactgttcgacggcgtgttctccgacgccggacagctgcgcacctcgaacgtcacccgcgaggtcaccgacaagcggcatcaggccaagaaccctgaggcgttctttcccgcgcaattgatcgagaccggcgccttgaacatctcgaccgagcttgccgacaagcgcaacctggacaacctcgaccggggcgtgttcgtccgggagctcgcccacgtctacgacgaactgggctacctgcacccattcaagggaggcaacgccatgacgcttcgcatcttcgcgtcccgtctcgcgcatgacgccgggtgggatctcgactggggaggcgtgacgcgcgagtcatacaagcaggcgaaacacgccgcatatcgaggtgacatcaacgccttcagccagatgttcgccgacatcgtgcgccccgcgaaccccacgcgggtcttcctgatcgccggctgggagcaggggcccgctcactgaccgaagccgcggcgactctgttgccggtcaccacggggtaccggtcgccacgggccgctctgccattactgcaggtcgcccagatgatgttgcgtatactcgtccgcctgcgcatcgatcgggtcgtaatcgcccgcgtcggcatggtcgataacggccatcgcgttatccaccagtcgcggattgagcgcatggagccaatggatgcgcgggtcacgcccgaaccatcccatctgcttgcgggcgagccgtttggtcttctgtgcgatgtctcggaacgtgtcatccagatcgcacagcccgtccaggtaatcgatgacttgctgatagcccagcgcccgcccggcggtcgctcccagatgggggcggatccgctccacctcttcgatgaaaccaccctccagcatctgcttggtgcggatgtcgatgcgctggtccagctcctcgcggggcaggtccagaccgatctgcactgaggcgatgacgtaccggtagcggggcagactggcggaatacggacgcccggtcacttcgatgacctccaacgcgcggatggtacgacgcgggttgtgggggtccatgcgcgacgcggcctgagggtccttcgcccgcaactcgtcgaacagcgctccggccccctcgctgcgctcacgttcctccagtcgcctgcgcacatcaggatcggtgccggggaacgagatgtcgtcgatggcggcccgcgcatacaggccggacccgccgacgagaatggggcggattccgcgtgattgcaggtcatggatggtggctcgcgctacctgctggaatctggcgaccgacatggcctcgtccggatcgatgatgtcgagcagatgatgcggaaccgccgcctgctcgtccgcggtcggtttggccgtgccgatgtccatgccgcggtacatctggtaggcgtccgcgttcactatctcggcccgctccccccgttccgccagcgcccgggcgacggcgatgccgaggccggtcttgccggacgcggtcggcccgacgatgctgacgaccctcggcatcgccacggacgggtttgctgactgaccttcggagcctgacgaggccgggccggtcacgttcgacgccatgtcattattcgtcaatttatcagtcatggtcacatcgttcatggtctcgttcatggtctcgttcatggtctcactcatgatgtcgtctcgcttatatcgcggtgtctgtcccgctcaccggcggaccgcatacgtctggccggcgttgacatccgggtcggcgatgagattgtggcgaccggcatgggtgacggtcgcggtcacgaaatcaccgatctgcggcatcggctcgccgtccggcacgccgatatgcaccagcacgccggtccgttcacgaccggtgacgcgatgtgtcgcggaatccttcttgccttgggccccggtaatcatcacttcgacgtcacggccctcgaacttggcgagctcctcttccgtgatctgctcctgaagcttcaccagccggtcgaaccgttcctgcacgacctcatgcgggacctgctccatttcggccgcgggggttccgggacgcggcgagtattcgaatgtgaacgccgactggaacctcgcctgacgcaccacatccatcgtcgcctcgaaatcctcgtccgtctcgccagggaatccgacgatgatatcggtgctgatctgcgcgtccggcatcgcctcgcgcaccttgcgcaggatatccaggaacttggcggaacggtaggagcgacgcatcgcacgcaggatcttgtcggagcccgactgcaacggcatgtgcagctggtgcatgacgttcggcgtctcggccatcgccgcgatcacgtcgtcggtgaacgccgccgggtgaggcgacgtgaaacgcacacgctccaatccctcgatgtctccgcaggcccgcagcagcttggagaacgcataccggtcgccgatgccgtaaccgaacgagttgacgttctggccgagcagcgtgacctccttggcgccttcatccacgcatcggcgaatctccgcgaggatgtcgccgggacggcggtcatgctccttgccacgcgtggtgggcacgatgcagaacgtgcacgtgttgttgcagccgatcgagatggatacccagctcgacaccttcgaagcgcgggcgaccggcagctgactggggaaatagtccagcttgtcggccacttcgacctggcaggtccccgccatgcgggcctgatccagcaggcgcggcagcgagccgatgttcttcgtgccgaacaccgcatccacccacggcgccttctgtgcgatcctcttgcggtcaagctgggccatgcatccgccgatcgcgatctgcatgttcggatgcgtgcgcttgaggtccgcccacaggccgatggtgccgtacatgcgttccgcggcgttctcccgcaccgcgcacgtgttcatgatgatcaggtcgacgtccttgtccgccgcctgttcctcggtcgccggcatgtatccgtcatcttcgagcacaccggcgattcgctcggaatcatgcacgttcatctggcatcccagcgtgtgcacgtagaatacgcccttgccgcgccccgttgtggcgccaagggtcgggtccgtcaatgtggaggtgcgctccgactcggtcatcatgtcttcgttcatagtcaaccatcgtaacgattgcccaagccagcaccagcgtgctgcgatttttcagttcctccgcaagagttcggctatgatggtgaaccgtgatacttgaccgacaaagccgcatcaacacgaatgacctgaaaacccgactcgatgccgtgggcatggaccgggggtctttttcgccggaagaactcaccgaattcgtgaatctcatgcaagtctacgaaggcgcgatgtatgagataagcaccaaactggagatccttgattcggagttccaggtgcggttctcgcatgatcccatccatcacatggaacgccgtctcaagtcggtgaactcgatcctcggcaagctcaagcgcaagacgctgccggtgaccatgtcgtcgatcaaggacaacctgttcgatgtggcaggcatccgcgtgatctgcaactaccgcgacgacgtgtactccgtgtcgaactatctgtcggcgcagaacgacatctccgtactgcgggtcaaggactacatcaagaaccccaaacagaacggctatcggtcgctgcacgtcatctatgcggtgcccgtgttcctctcatccggcgcccactacaccccggtggaggtccagttccgcaccatcgcgatggattactgggcgagtctggagcacgccctgcgctacaagaccgatctgccggacgcaaagctcgccgagcactcgcagacgctgcttgattgcgcgcggagcctgcagaacatcgagacccagatgcagaacatccaccgcgacatcaacggcgcgccgcaggtcgaggagacgccgaaagccgactaagctggtcgaatcggcccccgtcacgcatcctccgccctcgctggcgggaacggatccgtctgacggccgatcagcgggattctgtctttcttgttttccggtcgcattccccgatcgcgttcactgatcccgttttccggtcttgttcaccgccaatcgtctgcggccgacaccgggcatctgcgcgagcacgatacccgcgaagatcagcgcacagccgaggtatccgcgtaccgtcatcgtctcgcccaacagcaatgcgccgccgatgaccgagaacaccgattccagcgacatgatgagcgatgcgcgggtcggcggcacccactgttggcctacagcctgcaacgtgtaggcgacgccgactgacccgattcccgcatacagcacggcgatccacgcctgccctgccccgttccagtccatggagccttcgatcagcgtgccgatccagctgagtgccgcggtcgtcacgaattggatgaatgacagtgtcagcgcgtcgacgcgcgctcccagcgtatcgatcgacaggatatgagcggagaacaggaccgcggtgaacagcagcaggcagtcggccagcgtcagggaaccgaagccgtccgtgatgcacagcaggtagaatccggccacggccacgcctaccgccatccaagtcatcatgcgcactgcgcggcgaaggccgagatacgccagcaacggcaccatgacgatgtagagcgcggtgatgaatccggcgcggccggccgaacggccgaacatgatgccgtactgctgcagcgtgctcgccgcgaacaggaacacaccgcatatcattccgacgatgagcgggttcgacagtgcgctgccgacgatcatgtcatgttcgtcatcgccggcctcacggttccccgcgccaaccgtcttccctgattcccggcatcgtcgcaaacgcttccacagcagcaacgggatcagcgaaatcgcccccaaggtgaaccgcgtggcgttgaagaacaacggcgacatcgatgccatgccctgcacctgggagacgaacgcgaatccccaaatcagcgaggtcaatacaagacatgccataccggccatttcctgctgcttcatgagcattcacgctagcgtatcgccgtgaccggtcccgaacgatgatggaatggtctcgctgattcgcgcgatgggcatctgaacgatgatggcccatcccgcggctgcgggatgggccatcgcatctgccgtcgtgacaatatccgtattggcggaatcggctatgacggtaccgttccagtgatatcagtctcggctgccgaacagttgaaggatgtacaggaacatgttcacgaagtcgagatacaggttcagcgcgcagatgatggagatcttcttgatcatctccggcccctgggcctcataggcgctgaacagcgcacgggtctgctgagcgtcgtacagggtcatgccggcgaacagtatcaggccgaaggcgcagatgatacgcatcccggtcgtgctgcccggaacgaacatgagcacgatctgggagatgatcagcaccaccaggcccaccatgaggatggggccggccttgagcatgtcgaatttcgtggtcaacgagaacatggtgagcacgaagaagaacgccgcgcacaggaccagggccacgccgatgtcggagatgctgtacaccaggaagatggagctgagagtgaatcccatcagcgccgcgtacacgtagaacatgacacgggcggtcgatgccttgatcttcatgatgcgggcgcccagcgccacggccagcacaacctgtacgatcgcgaatccgaagaagccgatcaggccggttgactcgatgaaggagacgtatgcgccggtcatctgcgcgacgaccgcgacgacggccgtgatgataaggccgagcgtcatctcgccgtatgccctggtgacggatgcccgttgggccgcctgcacctgttcacggctgtagatggtctgggcgttgatcgccgcagtgccgttgggcgcgtatgaatactgtgattgtccgtattgctgctgcccatatgcgggctgctgctgattgccgccgtaatagggatcgccgttgcctggctgctgtccaaatgtcatgctggctcctttgtttgcgtacgcttcatcgtaacggagaaggctgaacaaatcattaatgttcagccttgagcatcacaccagcaacgcctgcctattcgtctatttcaggtcgaacgtgtgcacgaccttccgagagtcatcgatggagaacaggtcggtcacgtcgacggtgatggtcgactcgtccttcaacacgtatcccagggtcacctttcccgtcgctccgggctggatctccgccgtatatgaattcatgtcatatccggtcggctggtcaagatagacggcggtgtccagggcctgtccgttctggaacacctggggatgcgacagcgcggcgaaggagttgttcttgcctgaattgttcttccattcgtacgtgaccatcaccgtaggcttgtcttcatagtcgttgcccgatttcgccgcggagacgatcgtgacatggaggttcttgagatcaccctcctggtcctgctcccccgatgccttggtcgtatcggtggagtcattgttcgtcggatcgttgttcgcggaaccgtcgttggaggaatcgtcgccgctctttttcgcgtcggatgacttgctctgtgacgtgccggaaccgttaatggcctcatcaatggccttgctggctgcggactgcatggccagagtgatgacgatggcgagcaccgacagcaccgccgcgacgatggaaagtatcttgcccgccttcttgccgcggaacgtccccaccatggcgatgatcgccagcaccacgccgatggcgcctaggatggccgctatattgttcacgatcgggataaagctgaggaccagccccaaagcgccaaagacgacgcctacgataccgcagatcgtggttcctttgggggtaccctgtgcggacgtctcccccttgataccgtgcgacatagcattctccttcttgatctcggtgagttatgcaccatccacgctatcggagttcgcacgtttgcatcagtggacgaacgttcatttccgattgccctttcgggcagataagaatgaacccgcgttcgatggcgcggaaagacctgaccccgtagagtggatgccatgaatgatttctcgccccacccccgcgcgggaggaccgctcccggcgacgacgtccgacgaggacaccgtcgccgtgcgcacgcgcgtatggtgcaccgcagtgatgatcaccgtttccgcgttcatgtgcctggtgcagacttcattcgcagccacccggtacatcaataatccggtcaacgccatgtacgtctggttcatcgcgagttccctactggccttcgcgttcccgttcctgctgcttgcacgcgacaagcacccggaaccggtgttctggatctgctgcgccgtcatattgatctttccctatgatccgatgctgatgctgatggcgctcacatcgctgatcgcaagacgccgcggcaggcagcgcatcatccgtgctatcgtcgcggcgacgctggtcggggtctgggggcagatgcgcgacacgttgcgcccgttcaactcctcgatgtggcaatcggccatcttcatcaagccggattcggatgtcgcctcgggccatgccgtgatgcttgaggggaggccgaccatcatagccacagccgttgtggtggagctgatagccgtcctcatcgccattctggcgggactgtatatccggtcacgagtgcaattggacgaggccgctaccaagacccaggccatcagcgattatgcggtgagcctgcatcgcaatctcaccgatcagcagctggccgacgccatcgcagccgaagcccacgacacgctcgctcattccttgtccctcatcgccttgaacgccagtgccctgcagggcgaggcacgggcgttcatccagcttgccgatgcgacgaacccacatgagacggggcagatgctgacccccgaattgcggaatcaggcttcgcttatcgaagagaaatccgaggagattcgacggcaatccgcaggagccttggatgaggcgcattccatcatcggcatgctccgtcacccccaacaggcacgtcagcagctcgctcccgccccgcaaacgtcaatgacacgcccgtcattggacgccctgatcaacgatgcgcgctccgccggcatgcgcatcaacacctggatagacatccagcagctctccgacctcgatgagggcacagggaaaatcgcataccgagccatccaagaggggctgaccaatgctcgcagacacgccgagggtgagccggtgtctgtggaagtcacgatgaaccccggcaacggcatccgcatccacatcagcaatcccatgaagcgtggtctctccgccccgaacgagcgcgaggtcccatccgcaacggacggcaacggacttgccggcctgacggcacgggtgcagacggccggcgggacatgccgatacgggcacgacgaccaccatgtcttccatctcgacgtggcaatgccgtggatcgcctgtcaagccgatagaatgaagccgtgaacgattccgaacagcacgtcatcaccgtgagcgtcatagacgacgatccgctggtgtgccaggcgatgagtatgattctccgcgattactcgcaggggcgtgtctctgtcgtctccacatcaaccgacggagccaccgccgtgcgaaacgccgacagcgagcacccggacgtcgttctcatggatgtggcgatgcccggcatcgacggcatcgagaccacccgtcgtcttcgcgcgcttcgcaatcctcctcacgtgctgatcctcacatccttgaacccgtccaacacggtggaacgctccgtggaggccggcgccgagggattcgtatccaagaccgacgcgccggaggacatcatccgccgcatagtcggcatatgcgaggggaccccgcagttcaatccggccagccagagacagctcatcaatgatctgagcatgcagcggccccagtccaggcgtgacgaggctcgggccctgctggacacgctgccctcccgggagcgcgaagccgtgctgctcgccgccgaaggctgcaccaacgccgagatcgcaggacgcatgttcatatcggaacgcaccgcgaaagcgcatctctccagtgccgcggacaaactcgacatggggcgcgtgcagatggcacggcttgtcgaacgagcggacctgtaacggcgccgtcacgcaagccgccgccagcgcatccataccgacccgctggtacgctgatgctcagcagctaccgatgagggggcgtcatggcaatcaacgcgacggaaaaaccactgggcaaggtgttcactccggactatcagttgtccatcccatccttccagcgcgcctatatctggaaaccggagaacatcctgcagctcatcagcgaccttgaggaggcgtgcaaatcaccggagacgccgtatttcctcggttctctgattctcgtgcgggaaggcgacaccagcttctcggtcatcgacggtcagcagcgtctggtctcgctgtcaatcatcatcgccgcgctgcgcgacctcgagcatgacgaggaatggatgcgtctgctggacgctctgatcgtcgagcccggagacaagctgcgcggcatcacctcgcagccccggctgacgctccgtgaacgcgacgccgcatttttccgcgaatacgttcaggaaggcaatctggaggcgctgttcgacatgaacgatgaggactgctcctcgaacgcgcagcacaacatcatcgccaacacaaagcaggcatacgatgcattggcacagcttgacgaggaggaacgccaccggttcgcatcctatctggtcaattcggtaaccttggtcatcgtcaccaccgatgaccttgatggagcgcatcgtattttcgacgtcatgaacatgcgcggcctccccctgacgccatcggatgtgttcaaggcccgggcgatgtcaggactgcccgccgccgcggtggacgcgtacgcctcccgttgggatgacatcatggatccgctgggcgatgacgccgcccgcgtggaggagttcttccggtatctgcatctcatcctcacgcacaagcccgcgacgggcaaactgatcgaggacttcctttccgacgtgctgaaccagtatctcgccggacattccattgaggcgttcatcgacggtgttctcgccccgtatgccatggcgtggcgcattcttgagcgcccgtcggataccgtgctgccggatgatgttcgaggcaggctggaggcgctgaacgactatcggcatcatgagtggaaagccgtggcgatgtgggcgctgacgcattcgttcaggaacctcggcgatcccgaggtctcgttcttcgcccaacgtggttcgcattcggcacgggacggcggcaggacggccgacccgttggggtcgcatgaccgacagcgcttaggcgagattctgtgcgctttggaacaggtggccggtgtcgatacgctgaatcgtcggagtgccattgaccgtcgtgggcacaccgcagctgcgatccgcgatctggataagggattccctgttcgcttggtacgcggactgtccgtcagcgccgccgaccgggcaggtgccctgatcaggctgcatggcgagttgcagggagaccctgatctggtgcgtctgctgttggttcgggccaacgagcagcgtgccggggctcgcattccgcgcccgcgtgcgctggcggtcgtaccgatcatgcctctggatatcgcgtcggcggcgtcgttctcttcctggacggcggacctgcatgactattggatgtatcgtctgggcaatatggtgctgatgcaaggcaaggaggggcagatcgaccggctcacggagtacgggcgccgtcgcgaccgcgtgctgctgcgtgccgactcctgccgtttcccgctgaccaagcagattgccgacttcaacgaatgcacgccggcgatgctggaataccggcagaaggagacgattcgcctgcttgccgaatactgggacatccgttatgacgagagccatgccgatctgacgagcaaacccccggagcagctttccggcgatgcaggctcccggcagacgcgcggttcacagcgtgtcaccatcaagcaggtcgtcgccgccggtctgctgattcccggcgagactttggtatgggagcgaccgcgcaagggcgaacgttggctggtgaccgtgacccaagagggacgcttccgtcttgaggacggctcggaatatgcgtcgcccacggccgcggcacgcgcggcaggcggtcgcagcgccggattggatgtgtggaagcgtacgtcgaacggcgaaaaactcagcgatatctggaaagcctaccgtctgcgcacccgctagacgcctggctgccagtccacgaccacggcacttcgacaagtccgccattcccatatccctcacccggccatggtcccacatcagacgacataaatgggactgtgggcggatggaagatgatgcgtataccgaaaaagtcccatcgcagtgcatgcggatgggactctggctggataaggggcgcataaaacagcggcaacaaccaacggcaacggtctggcagtcagatgtgccgctcggcgatcactccgtgatgccgtattcggaggcgatgacccgccacaggtcctccgccgccttatcgacatcatcattgacgatggtgacgtcgaattcgttttcggcggagagttcgacatgagcggtttccagacgcttggcgacttcctcgggagtttcggtgccgcgtcccttgagccggcgaacgagctcgtcgaagctgggcggggcgatgaacacatagacgacttcgagaccgagctccttggcacgctgcttgacgcgtcgggcaccttgcaggtcgatctcaagaatggtggggacgccttcggcgaggtgttcctgaacgggcttgaggggcgtgccgtagcgggccaggccgtggaccgtagcggtttcgagaaaatcgccggcctcttccttgtcggtgaactgctggtcgtcgaggaaccagtagttgacaccattgacctcgccgggccgcggcttgcgggtggtggcggacacggagacccagacgccgggatggttcttgcgcaggatgttctcgacggttcccttgcccacaccggcggggccggtgaggacgacgaggcgcttgcgaggtgtgccatcatcgtcgagagtggccgctggctcggccggggtctgctgcagtgatgcggtaatggttcccataccgtctttctccttgtcctcgccttctttcatggcttcgtagagcgcctgccggacgtcgatggcgatggcctcggtggcttgggcaagcgcggaaatatcgggcccatgggcggcgatgaaacgggatacggtcaccagaacgttgcccttggtgcctttgaagacggttttgaggtccttggcctcggcgccctgccagccgtagcccggggaaaggatgggaccggtgaatttcgccgggtcgacaccgctgtcggcgatccactggcctatggtggcgccgatgatgagcccgaccgagcccataccgtcgatgtcgtcattgaacttctgggcagtgctggcgatgccgaacgccacggttttgcccttgaagtcgccgctctggcggatggccgtctgcatgctggcgccttcctgattggaggtcagggaggcgatgaagacgccgcgaccgttgttgagggcctcattggtgaggccccgcaacgagcgtgcgccatagtacggcagcagggtgatggcgtcggccagcagaggggcgcccggcttgaagtatgcgtccgcgatggcggagatggtggtggacaggcctccatggaggcagtccacgatggtgatgatgcccatttgacgagcggcgtagagcactcgttcgagcgccgcgaatcccttggacccgtagcgctcgaacatgggctcctggaatttgacagcggcggcgcggtctcgcatggcctgaagcatgcgcatggagaacagctccgcgccttccgcgtcgacgttatacccccagtcagtgaggtttttcctgtgcgggtcgatgccgacgcacaaggggccgtactgggccatcgaactgctgaggcgcagtccgaaatccgaccgcatggccttgacttcttcctcactgctggcgtgtgtcatgattgctcctggcctaacttattcctggctctccaactcgaacagctgcttggcgtgctcctggatgctcatgatctggtaatcgttgtgcttgacggcttcgatggccatcagcacggcggagaactcggtcatggtggtgaactggggcaggtcggccgcgatggccgcagcgcggatggaatatccgtcggaacgcgatccccgggaattcggcgtgttgaggatcatgtcgatcttgccttcttcgatgagctcgaccacgttctttccgatgccaccgacggcgtgctcgaccttgacggccgcatccgggtcggagtcgacgcgggtgctgatcttgtcaacgatcttcgagtcgatgccgtaacggcgcagcacggacgcggtgccctccgtggcccagatggagaatccgagctcgaccagacggacggccatcagcggcagctgccgcttgtcggtgtcgttgacggagatgaagacgttgccgctggtaggcagtccgccgtcgtatgcggcgagctggctcttggcgaaggcgtgcgggaagtcacggtcgaagcccatgacctcgccggtggagcgcatctcgggtccgagcaggatgtcgacggtcttgccgacgggcgtgcggaagcgcttgaacggcagcacggactccttgatggcgacctgctggccacggtggatgtcaccgccgtcacccttgggcagcagcaggccgttggcccgctgatcggcgatggtctcccccgccatgatgcgggcggccgccttggccagggccacgccggtagccttggatgcgaacggcacggtgcgggaggcacgcgggttggcttcgatgacgtacagcgtgttggccatgaaggcgtactgcacgttgatcaggcccttgacaccgcagcccttggagatggcgtaggtgccttcgcgaaggcgacggatctggtcgtcggacagcgtgctcggcggcagcgtgcatgcggcgtcgccggagtgcacgccggcctcttcgatgtgctccatgatgccgccgatgtacagctcttcgccgtcgaacagggcatccacgtcgatttcgatggcgtcctgcaggaacttgtcgatgagcagcggggagggcaggcgtccggacacgaccgtgtcggccttggcctcgtcgagcgcacggttgacgtacttggtcaactgggcgtcgtcgtagacgatttccatgccacgtccgccgaggacgtaactggggcgcacgagcaccggatagccgatgttgtgggcggcctcgcgggcctcttcaagcgacagcgcggtgccgtagcgcggcgcgttcatgtgctcgcggcgcagcacctcaccgaacagctcgcggttctcggccaggtcgatggactccggggtggtgcccaggatcggcacgccggcggccttgagtcgcgcggccagcgacagcggcgtctggccgccgagctggacgatgacgcccttgaccggacccatcttcttctcggcctcatagatctccagcacgtcctcgaaggtgagcggctcgaagtacagccggttcgacatgtcgtaatcggtggagacggtctcggggttgcagttgaccatgatcgtgtcatagtccttgccgagctcctgcaccgcgtgcacgcaggtgtagtcgaactcgatgccctgaccgatgcggttcgggccggagccgaggatgatgacagcctcgcggtcgcgcttgcgcagctcggtctcgtcggcgtagcaggagtagtagtacggcgtgaccgcgtcgaactcggcggcgcaggtgtcgacggtcttgtagaccgggcgcaggccgtaggtccagcgcagctcgcgaatcgtgttctcgccctcgtcaccaagattgcgcaggtgggcgatttgcaggtcggacaggccggcgagcttcgccttcttcagcagcttggcggtgagtttctcggcgtcgcgcacttccatcgcggtctggttgatgagggccagctgcttgacgaaccacgggtcgatcttggtggcgtcgaagatctgccgttcggtggcgccgccccacagagcgcgctgaatctgcagatagcggtgctcggtcggcacggtgatggctttgagcagttcggcgacctcggcttcgtccggcttgtcaccatcccagctgaagcccatgtggcgcttgtcgatggagcgcatggccttgcccagcgactcctggaagttgccgccgagtgccatggcctcgccgacggacttcatcgacgtggtcagacgcgggtcggcgccggggaacttctcgaacgcgaagcgcggcaccttggtgaccacgtagtcgatggtcggctcgaaggaggccggcgtggactgggtgatgtcgttgcggatctcgtcgagggtgtagccgagcgccagcttggtggcgatcttggcgatcgggaagccggtggccttggatgccagggcagaggaacggctcacgcgcgggttcatctcgatgacgatgatgcggccggtgtcagggtgcacggcgaactggatgttgcagccgcccgtgtcgacgcccacgccgcggatgatggcgatgccgatgtcacgcagcttctggtattcgcgatcggtcagggtgaagcagggggccacggtgatggagtcaccggtgtgcacgccgaccgggtcgacgttctcgatcgggcagacgaccacgacgttgtcgttgcggtcgcgcatcagttcgagctcgaattccttccagccttcgatgccctcctccagcagcacctcgtcggtcggcgagtaatgcaggccggcgccggcgatgcggtgcagctcctcctcgtcgtgcgcgatgccggagccgaggcctcccatggtgaagctcgggcgcaccaccaacgggtatccgagttcggcggcgacggcgtccacttccttcatggagtgggcaacttcggagcgcgcggattcggcgccagcctcgtcgacgaccttcttgaacagctcgcggtcctcgccgcggtcgatggcgtcaagggaggcgccgatcagctcgacgttgtacttcttgagcacaccggcctcgccgagcgccatcgcggcgttcagtgcggtctggccacccaaggtgggcagcagggcatcggggcgttccttggcgatgatctgctcaaggatgggcgtggcgatcggctcgatgtaggtggcgtcggccatctccgggtcggtcatgatcgtggccgggttggagttcacgaggatgacgcggatgccctcttcgcgcagcacgcggcacgcctgggtgccggagtagtcgaactcggccgcctgcccgatcacgatcgggccggagccgatgaccatcactgacttgatgtcggtgcgtttaggcattgcggttttcctccttggacgtcttcatcagatcgacgaaacggtcaaacagatatgcggcgtcgtgcgggccggccgccgcctcgggatggtactgcacggagaacgcggggatgtccacgcactgcaggccttcgaccacgtcgtcgttcagatcgatgtggctgacgaacaccttgccgaagtgcccgttgtcgaacggggcgtcgacggtctcgccgataggcgcgtcaaccgcgaagccgtgattgtgcgcggtgacctccaccttgccggtggtcaggtccttgacgggctggttgatgccgcgatggccgaacttgagcttgtaggtgccgaagccgagtgcgcggccgagcagctgattgccgaagcagatgccgaagaacgggtagccggcgtccaggaccttgcgcagcagctcgacctcggggtcggcctgctccgggtcgccggggccgttggagaagaacacgccgtccgggttcagcgcggtgagttcctcgaaagtgatggtggacggcacgacgtgcacgcggcagccgcgctcggccatgcgatgcggggtcatgcccttgactccgagatccacggcggcgacggtgtagagcggctccttgccctcgtactcgccacacggctcgaccgtatacgtctccttggtgctgacctcgtcgtacaggctcagacccttcatctgcggggtggccttgacctcgtcgatgagcgcggcgacggtcttcaggcgcccttcgtcgtcgagcagcgcgtcaccggagaagattccggcacgcatgacgcccgcggagcgcaggtggcgcaccagcttgcgggtgtcgatgtggctgatgccgacgatgcgctcggcgacgagatcgtcgtcaaggctgcccgtggcccgccaattgctgacggtggggctgggatcgcgaaccacgtatccagccacccagatacgggaggattccggatcctcccggttgattcccgtgtccccgatgtgcgggaacgtctgcaccacgatctgccgatcgtaactgggatcggtcaaagtctcctgataaccggtcatgccggtcgcgaacacgatctcgccagtggtcttgccgatcgcgccgtaagagtcacccacatacacttgcccgtcctcaagtacaagcacggcgtcatcaggggcaaaactcacggtttcggaatcaatctggttcaccaaaacccccttattttctcaggatattcgtaccaaccttaactgtcggcggggacgcgccccaccggcaattcggctggttctcgtcatttacttgtggactcgccgtcctgctggccggcttgtggatcggacgtctgctcggatgcagcttcggcaacgtcatcggatacatcgtcgaacgtcatgtcgtcgaaatcgacgccgtcggcgatgtcatcgtcctcggactcttcggaatcgccggtttcggcttccgcatgcgacgcttcgccggcaggctcaccaggctcttgaccgtcgtcgctcggctgtgcgtcgggctcgtcgttttcggggtggagaatggcctcgcgtccttcggtgtcatcgcaaatcgcgctgagcaggccgtggatgaacgccggggagtcgccgtcgctcaacgtcttggccaggccgagcgcctcgtcgatggccacgcgatcgggcacgtcgtcgttgaagatgatctcccatgcggcgatgcgcaggatattgcgatccacgacggccatgcggcgaaccttccacccggtggaatgctcgttgagcatgtagtcgatctcacgccggtgatcggcgacgccgcgcacgatctcgatggcgtagtcgggaagcggggtctgcgcaccaggctcttcgatgcgctcagcaagaagggacaggaaatcctgtcccttctcgtccgcctcatacaacgtgttcagagcccttttgcgagcggtggaacgtgccatggaagcctgttgtccttactctcagttctcgcggccgaggtaggagccgtcgcgggtgtcgaccttgaccttctcgccttcgcccacgaacagcgggacctggatctcggcgccggtctcgacggtggcgggcttggtgccggcgttggagcggttgccctgcaggccgggctcggtgtgggtgatggtcaggatcacggaggccggcagttcgacgctcagcggggtgccgtcgtggaacgacacgacgcagtcggtgccttccagcaggaacttggcctggtcgccgacgagggtcttggggatgtagacctgatcgtaggtggtcatgtccatgaagacgaagttgtcgccgtcctcgtaggagtactgcaggttgcggttgtcaacggtctcgaactccatcttcatgcccgcgttgaaggtcttgtcgacgatcttgccgctcagcacgttcttgatggtggtacgcacgaaagctggacccttgcccggcttgacgtgctggaacttcgtgacggtccacagctggccgtccaggttcaggacggatccgttcttgatgtcattggtagtctgtgccacagtaactcaccttttcatgttttcaatttcggcaaagctcaaaaatagccttgtctattatgccataccgtctatacagcgcgtcgcggccgaacaatcccccaatggcatcttccggctgcatcagctgttcctcatgcaattgaaacggaacaagcaatagtggttaacgacaattcacctaatgacttagtagctgaataacgaacataataatgacaatgacgacatgtcggctgaaccgataggagacaaccgacatgacgccattctcacgtaatcaatcgatgcagtttatagtgttgatgcaaagaacggaatcaagcatgtggtctgaaacacgaacctgcggcgcgaagatacgcgtcgcgcgctcattgacgtctggcagtaattctatgcacaggcaatgcttcgcctcaacatatccttcctgcctagtcgacttacttggtaacgtctcgacttcggtatccataatcattcgactcctttcactaacatagcgttgccgcatttattacaccgctgtgaacgatatagatatgattcgttacatcagcatcagagagaaacatcttcattccctttctcgtttatggtaggagctattcactatttaggaggtgctgctcttgttggtcaatttagaatcacatggcaccagatccgtagaaatcaaagggcatttcgcctttgtccattttacaggcaaccagtttccggccttcttctggaagttacatgtctcgcttcctcctcgcgactacgaaagacacattcaatcaatagttgacttcctggtgatgagaaaagtcgatttcaaattgccggatatgacgttccctcaaatactattcaacagcaattggaatcgtgcatacaatatctgacgttcaaaagggaagccctcatcccctatgggtggaacgatacagcagagcatcctgtatatggagatgacgtcaacagtctcttcgatgtaatcgaactattcatatcaacagaaagaagaaaaaaccgtgactgaaaaacgtcaggaaaaagaatcaacaatctcaccatggagggtgagggattaccggtcctggttcgtggctgacactgcgtcagcactgggaaccacaatcggcggatttgcgttcacgctggtggcatatgcggtaagccatgatgtaactacggcaggtatggtcggcaccgtgttcgcactgtgcgaaggtttgggaacacttccaggcgggcacctgtcggatagaatcgatcgcaagaaactcatgattgttttcggtcttatatcggctgcaacactgtgtgtgatgacattggccctggttgcgaaaatgatgtcggcccctttgctattcctgtttgccattgtacggggactcacttccggtgtgttttccaatgtgtccaatatcatcttgcctcaaatcgtcaccgggaatcagctggtgcaagcctattccgcgaatgaatcgcgcgatgcatgcatccaattgttctccaaaccgctgtcagggttcctgtacggattaggccccgagattccattcctgatcagcgccgtcctgtatgcgctgatgtccgttgcgactccgctgattcgttcggatctacggcccaagaacgacgcctccccatcggattccgatgattccacgaagaaaacaccacgaaaccacattgacggcagttcatcgcattcatcgttgatcgaaggctttgcatggtacacgcgatggccacaagcagtatccgtattcggcagtgtgctcttgttgaattgtgtcctcaccctgatggtcagcattgtgattctgaatcaacagatgctgaacattcccggctggcagattgggctcatctcaaccggaagcggtgtcggactgctgagcgggtcgtttctgaccactccccttgccaaccgtctgacgggaggcagaacagtacaagtctccttcatcatcatcatggtaggatgcgctttacagccattcacccagaatacatatctactggccggatgcatggcgatcatgaatctcatggtcgttcccgccaattccgtccttggtgcctacgcgtcgctgatcattccgaatgatttgcgtggccgcgtgttctcagtgttctccttgtttaacatcacgcttgcctcattggcgtccggtattgcgggaatcatgctttcctctctggggtacatgattgcggcggcgaccaccgccgcaatcatgacaggtaccgtattactggccttcatgagtaacggtattcgtgaaatacctgacaaggcggctttctcgaaccttgaaccgtggcgctgactactctcgcgatatccgcagccgcctacccgcaatgaggacgagccccgacgtgagagtcacagccgcgagcatgaagaccgccgtcacggccgcgcccgtgtgagccagccggacggtcgatccgccgagacccgcacctgaaggcctctgaatagttgcaccatgctgctgcccatcgccgttgctcgggtcggcgacaaacactgaccggtcgatctgcacgttgacgattcgcgtcgtctctgtggtgtcgaagttgttgtcggtgagcaggctcagatcgagccggccattgtcgtccgcatgggtgatgaccagatcctcgaagttgtcaagcaacgggttggcgtccatgtattgcgcattcggcttgaactgggcgccaagggtcagcttgccgccgaaatcggcgagttccgtgaccggcaggaacgacgagtcggcgctcttcgacagcgacgcgacatcggagacgtccggggcggctgcgatgccgtgcgcatacgcaagctttatgccgtacccatgggtctggtcccaggagcgttccagcaccaggaatccgtcctcgccaatcgccgcgaactcggtgatacccatgttcacgtcggcggccttgaacgccacttgcttgacgagcttccactgtcccttggcgcctttcacgtcgtcacggtagaccagcgcgcggcgggctgtggtggcgatgtccttgccgctgggcgaatcgttcttgagggcgtactcgttgccgaccacgatctgatggccggacggcgataccgtcagcgcttccaggctcttgttgtgcacggcctgtcccctgcagttgatgtcgaacagttcaggcacgggcaactcgtccttctgacggccgtcgatgccgaagatacggatcttcggctgctcatgctcgccttctgccgcgttcggatggccttcggaggtgagcaggaagtcgccgttcggcagcacgccgagcccctcatcatcagtagtttcgccgttgtatggcgtaccgttctcatcggtcaggacgatgctgccggtcggagccgccttgtcgagatcgttgcccagcagccataggcgagcgacatcggtaccatgattgtccattgcggacacatattgtccaagcttcctgttgtacgccgtcgaggacagtccgccgaacgctatcggctccgacgtgccggtgccgtcgctgaatccgttagccgaccagtagtcaaggcgatcgtttctgccgagtgccgtgacgtactgtgacaggcgaccgcttgccgagtcgtcgaatcctgccgccgtcttccggaacggttccgcttcgacgtcgaggatgcgcgtggtctgagtggcgctgtagttgtcgtcgctgatgatggagatagcggccttgtattcgccgtcaccgcgatgccacgaggcatcgggagtggcgagctggtcgaggttcgtgatgacgagcccttcgtagttatccatcagagggttcgcctgatgagcgccgggtttcgcggaggcgcccagatccggcagcttgtccagctcgccgatctggcgggatttcacgaactcggatgcattcttcgggtcgttgaggttcgccacaccggaaacatccggcgcgccattcagcccggagacgtacgagagcgccaccttgttgccggtctcgctgttccatgaacgttgcaggacgtacagggaatcttcggaatcgaggacgatatcggagatgtccagtcccggtaccgtgtggaaacccacctgtttgacgagcgtccactggcgtcgaagatcctgattgtcgggtgttcggcctgattcttgcccgcagggggaatgccttccgagctgatggcgaaatcgccgtcgggcagcaccgctatgccctcgttgtccgtcgtgttgccgttatagggcgtcccattaacatcggtaaacgtcaccggatcacgcgtgatggacgggttgtgcaggtccttgccgaggaaccacacccgagattcgtcactcccatggttgtcggattgcgccacatatgaatccgcggttttgtcccacgtgagacccgacagtcccccgactcgaatccccttgtaatcgagcttgtccagcgcatcgctgtaggcaacggccttgacctgattctgtgcgccaatatcagtcgtaccctcggctgataccgctggaatcatgacggatgcgaacagcatgcatgccgtcgccgtcaccgcggctattctcttgttcatgattttcccttccgaacgtaccgttcacatggccatgctggctctgcaaggtatcgggaaggggaataatcacgcgtctgcagatgaacgatacatgaaaagacggcgacatcgttgtccacctgtatggaattcgcctgtatgggtccccggaatacgaaagtgggtcctgaaacctcaagcaaggtttcaggacccactcagaacgctagttcaagcgtgtcgagttcttcgctgatgggaatcaggcgaggatcttggtgacacggcccgagccgacggtgtggccgccttcacgcacagcgaaggtcaggccctcctccatagcgatgggctgaatcagctcaacggtgaaggtcgcgtggtcgccaggctgaaccatctcgacgccttccggcagctcgatgacgccggtgacgtcggtggtgcggaagtagaactgcggacggtagttggagaagaacggcgagtgacggccgccttcgtccttggtcagcacgtagacttcgccctcgaacttggtgtgcggggtgacggagcccggcttggccacaacctggccacgctcgacgtccgtacggttgatgccgcggagcagcagaccggtgttgtcgccagcctcgcaggcgtccatggtcttgtggaacgtctcgatggaggtaacggtggtggtctgggtcgggcggatgccgacgatctcgaccggggtgttgacggccagctggccacgctcaacacgaccggtgacgacggtaccacggccggagatggtgaagacgtcctcgataggcatcaggaacggcttgtccaggtcgtgaaccggggtcgggatgtactcgtcgacggcgtccatcaggtccttgacggtctggacccacttgtcgtgatccggggcgtcatcgtgcagagcgccgtaggcggaggtacggatgaccgggcagtcgcggtcgaagccgttctcgtcgaggaggtcacggacctcttcctcaacgagctcgatgagctcctcatcctcgaccatgtcgcacttgttcagagcgacgaggatacgcgggacacccacctgacgggcgagcagaacgtgctcgcgggtctgggccatcgggccgtcggtggcggccacaacgaggatggcgccatccatctgggcagcaccggtgatcatgttcttcacgaagtcggcgtggcccgggcagtccacgtgagcgtagtgacgcttcgcggtctggtactcgatgtgggcgatgttgatggtgataccacgctgctgctcttcgggagcggcgtcgatctggttgaagtcgtactcagggttcagatccgggtactcttcgtgcagcaccttggagatggccgcggtcagggtcgtcttaccgtgatcgacgtggccgatggtaccaatgttaacgtgcggcttagtacgctcgtacttttcctttgccatgtaattgtcctcctggacgtctcgtgtagttggcttgcgcttgcggcacaagacactcgctacattgtactgggtttctgggtttcttgccactttggagccagaacccagtcagcggtatatgattttaccgctgactggagacacttacggcttcaaaacagctgcgcgtgtcactccccgcgctgggccttgatgatctcgtccgagaccgacttcggcacctcggcgtaagagtccatctgcatggtgaacatggcgcggccctgggtcttggaacgcaggtcgccgatgtagccgaacatctcggacagcgggaccttggcgtcgatgaccttgacgccggtggcatcggtcatggactggatgttaccacgacgctggttcagatcgccgatgacgtcgcccatgtactcctccggagtacggacttcgacggccatgatcggttccaggatgacgggcttcgccttgggagcggcttccttgaacgccatcgaaccggcgattttgaaggccatttccgaggagtcgaccgggtgcatctggccgtcgtagaccgtggccttgacgccgaccaccgggaagccggcgagcacgccggattccatggcttccttgacaccggcctcgatgggtccgatgaactcggcgctgatgtggccaccagtaaccttgttctcgaactcgaaggtctcgccggcctcggtgtcgaggggctcgaagttcatgaacacctttgcgaactggccggagccaccggtctgcttcttgtgggtgtagacctcgttgagcacgggcttgcggatggtctcgcggtaggcgacctgcggcttgccgacgttgcactcgaccttgaactcgcggcgcatacggtcgacgatgatgtcgagctggagctcgcccatacctgcgatcagggtctggccggactcttcgtcggtggtgacctggaaggtcggatcctcgtcggagagcttcgcaagggcgatgcccatcttctcctgatcggccttggtcttcggctccacggccacctggatgacgggatccgggaaggtcatggattcaagggagatcggggctttctcgtcgcacagggtgtcaccggtggacacgttcttcagaccgacgaacgtatagatgttgccggcttcggcggcgtcgaccgggttctccttgtcggcgtgcatctggaagatcttgccgatgcgctccttcttgcccttggtggagtcgagcacgttgtcgccgggcttgacggcaccggagtagacgcgcacgaacacgagcttgccgtagaacgggtgggtcgagatcttgaagaccagggccgcgaacgggtcggaggtcagcggcttgcggtcgatctcgacggactcgtcgcccggcttgaagcccttgatggacggaacgtccttgggagacggcaggaagtcgatgacggcatcgagcatcggctgcacgcccttgtccttgaacgcggaaccgcacagaaccgggtacgccttgcgctcgatggtgagcttgcggataccggcgcggatctcgtcctcggtcagttcgccggactcaaggtacttctcggtcagctcgtcgctggcctcggcgacgtcgtccagcagctgagcgcggtattcctcggccttgtcctgcaggtcggcggggatgtcgacggtgtcgtagtgggcaccctgatcggtggagacgtcgttccagacgtacgccttcatgcggatcaagtcgacgacgccggcgaagtcgttctcagcgccgatcggcaactgcacgacgagcggcttggcaccgagcttgtccttgatggtctgcaccgagaagtagaagtcggcaccgagcttgtccatcttgttgatgaagcagatgcgcggcacgccgtacttgtcggcctgacgccacacggtctcggactggggctccacgccttccttgccgtcgaagacggcgacggcaccatcgagcacgcgcagggagcgctcaacctcggccgtgaagtccacgtggccgggggtgtcgatgatgttgatctggaacttttccttggtgtcgtgggactgacggttccagaagcaggtggtggcggcggactggatggtgatgccgcgctcctgctcctgagccatgaagtccatcgtcgaagcgccgtcgtgggtctcaccgatcttgtagttcttgccggtgtagaagaggatgcgctcggtggtggtggtcttaccggcatcgatgtgtgccatgatgccgatgttgcggatcatgcgcagatccgtaagcacgtctagtgccattgctgttccttgctctcgatctcgaaattaccagcggtagtgagcgaaggccttgttggcctctgccatcttatgagtatcctcgcggcgcttgacagaagcaccgaggccgttggaggcgtcgaggatctcgttggcgagacgctcggccatcgtcttctcgcgacgggcgcgggagaagtcggtcagccagcgcagcgacagcgtgttggcgcgggcgggcttgacctcgaccggcacctggtaggtggcgccaccgacacggcgggaacgcacctcgagggacggacggatgttgtcaagagcgcgcttgagaacggcgaccggctcctggtcggtcttctccttgaccatgtcgagcgcggagtacacgatgtcctcggcgatcgacttcttgccgtcaagcagaatcttgttgatgagctgggccacgacggtcgagccgtagatcggatcgggcagcagctggtgcttcttagcaggtcctttacgtgacatttctcttacttcgccttctttgctccgtacagggaacgaccctgcttgcggtccttgacaccctgggtatcgagtgcgccacgcacgatgtggtaacgcacacccggcagatccttgacacggccgccgcgcacgagcacgatggagtgctcctgcagattgtggccttcgcccgggatgtaggcggtgacttcgatgcccgaggacaggcgcacacgagcgaccttacgcagagccgagttcggcttcttcggggtggtggtgtagacacgggtgcacacgccgcggcgcagcgggctgcccttcagagccaaagtcttcgacttcttcggctttgcctgacgtcccttacggacgagctgttcaatagtaggcaacttgaattctccgattcagtggtttcttccttttcgtgaagccgccgcactgcagcccacgcccacgaccatgaatcgtcataagcagccacagtccaccggcccgatggcccgtatctctttcacagtccgcattgctgcgcgcgatccaatcaagatccgggatatcccagcgcgtgctcctatcacataaggcgcaccactggcacacacaagtatctatattacttccaccgcggacaacgacacgcttgtcgtgacggcagacaagacaggcagataaacgaaaaccctccgcatgggagggttttcagtggggtggataacgcggcttgaacgcgcgaccttctgaaccacaatcagatgctctaccaactgagctatatccaccatgtgagtcgttccagcgaactggattaacgcaacagagggatactatacacgaaatatcaagccgcgtcatcgcggcgtgtcgcgcagccgcccagtatcattcactgcgcgattttgtgcgtttccacctcgacagacgggcgatatgttcacttctgtgcgattttttgggcacatgaaaacacctgcaaacattatgttttttacggctctcaaacttgaacttgttcgtttccataggtacaatgaaacacgaaggccggagttgttatcagcaggggaatcccgttgattgcaatgaagcgcacaaagcagtagcgcaacgtcttcacgataattaaataccgaggcaaacagaaacaatgcagcacgcaagcgaagcagtgcgaagcgacacgatgatgagtacgccatcagaagacatcgccatacggcaacgacatcatcgttcggcgacacagtgtggagcgtattacgctgagcagctcagcctgagatatccgcggtagttgtgagccgcagacgggaagagtacaacagcgaagaggcagagaatccgcagagccggcaacgcagctacggccgcagttgacgaggaagcggcacaatgccggctctgctgcaacgtgaccacacctttcataacagaagagactcctttcgcaagggcgccggatgctgatccacatccggcgcccttgtttatggcgcgcggtctgcggaacgcggcctgcgtcacgcggccgtacatgacccatgcgcggtacactcgctacataccctgatgcatccgcaccacgacacagcgcgacaaggagccgacatgctgtctttcggaaacgattattcctatggggcctgccccgagatcctcgaccgtctcgcgcggaccaacgacacggcgttccccggatacggcagcgacgcggcctgcgaagatgccaagcgcaggatccgcgaagcatgcgagacgcccgacgccgacgtgtggttcctcgtcggcggcacgcagaccaaccagaccgtgatcgacaccatgctcgccccgtacgagggcgtcgtcaccgttgattccggccatccgaacgtgcacgaggccggcgccatcgagtcgaccggccacaaggtgatcacgctcccccatcacgcgggcaagctcgatgccgccgagctcgacgactattgcgccaccttctatgccgacgacaaccacgagcacatggtgttccccggactggtctacatctcgcaccccaccgagtacggcacgatctacggcaaggccgagcttgaggccatcgccgagaccgcccaccggcacggcatgccgctgttcgtggacggcgcacgactcggctacggactgaccgccgccggcaccgacgtgacgctgccggacctcgcccgcatcgccgacgtgttctacatcggaggcaccaaggtcggcgcgctgttcggcgaggccgtcgtcttcaccaagggcaatacgccgaagcattttctcacgcagatcaagcagcacggcgcattgctggccaaaggttggctgctcgggcttcagttcggcacgctgttcaccgatgacctgtacctgcgcatcgcagccaacgcgaaccggcaggcggaccggatccgcgaggcgctgcgcgagcgcggctacacactgaccttcgaggcgccgacgaaccaggtcttcgtcaccttggaccatccgaccatcgaacggctgcaggcccatgtacgcatgggcttcatggagaaggccgacaacgagcatacggtgatgcgcctgtgcaccagctgggcgacgaccgacgagcaggttgaccagctcatcgcgttgctgtgaacagccgcgaggccgacgccgggcctaggccttcgcgtcggcgatggcctcgcgctccatggcgacgaacttcgcgaccgacgcctcgaccgaataatcggccttcgcgtgttcggcgtaccgtccgccccaaacggccagctcgtgcggatgatcgatccaccaatcgatgcgccgggcgagcatcgccacgtcgcgagccgggaacagggactcgtccaacaacgcgaactggctcgccgcgctcaactcggcggatgcgatcacgggcaccagccccgacgccatgccctcgatgacgctcaacgattcgatgtccacgatcgacggatgcacgaacaggtcacatgagcgcagcagcgccggcatctcggcgttcttgtggaacccgatttgcgccttgcgctccagaagccggtcggcgcggaaccgcaggtaatgctgcaacggcccggttccgcagatgatcagttcgatgtccttcgcgtgacggcagcgagaaatcgccttgatcaacgtgatctggtccttctcatgggaaagacgccccgaggcgacgatgcggaacggcaccggcgcgggggctccgtccgaacgctgccgtttgggggtgaaccgcggcacgtagccgtttgatatcacgtgcagcttcgccttgtacccgtgcgcgcgcaactgtccggcgatcatttcggtgggcgcgtggatatggccgatgcgccggtacagccagaagcggaacagggcgtacagaaaacccgacatcccaggcaggtatttcagcggaccggccgaatacatgacattctccggctggaggtggaatcccgcggtcacgggaatacccatgctccgcgcgaccttgtacgcgcaccgcccgaacttgaacggcagatacagatgcacgacatccgctccggcgaacgccgcgcggaacagcgtatcgcttggcttggcgaactgcatctgttgtttggcggccacccaggagaccagcggcaccttgttgacccgtgccggatattcgggggcgccgatgccgacgagtctgacatggtgaccctgccgctccaattcgtgcgcatactgcaatgcggagttcgacgtgccgttgcccttgttgccgatggtgtccatgaccagcacgatggtcagggggcgatccaaagccgacctgtcctgggggcgcggttcttcgttcttgttgtctcgcattgtttcatcctatctcgcagtctcgcgaatcacgaccgagacgcgcacggtggccggccgcatgccttcgccgcatgtctccatggccgcgtcctcgttgacgccatgtactcggccttcccccccctgaacgttggcccggcgcgggttaaccgcccggtaagagctattgtcacgcgggcggattgccgacgcaagcgtccggtcatacgggaaatctatgaccgcctatcatgacgaacgatgccgacgtccggaggatgtccggaacgtcggcatcatttaccgacacgccgttcctcgagccgtgcgatacgtgcccggggaacggtttgccgtcaggacttgcgcctcttgcgccacgtcagcgcgcagccggcggccatcatcgagaccgcgagcacgccgaccggcacgatcgaggtgccggtcgcggcgatggactggttcttgtccttgccgtcgttcttgtcggcatccttgtcggtgttcagcttctggccgtcgcccggagtcgtcgtacccggctcgtcgcccggacccggattcgggttgggatccgggtcaggatcaggcttcggcgtcgggtcaggatcgggttcaggatcaggcttcggatcagggtcgggatcggctttctccgccaccgtgaccgtcaccgaggccgtcaccgacggcaccgcgacggatgcgacggtgactgtggccgtaccggccttcagcgccttcaccgtgccgtcctcgccgacgctgaccgcgtcacctgcgaccgtccacgtgaccgactggtcgacggcatcctcgggggtgaccgtgacaccgagaccaacgctctggccgacggtcatgtccagcttgccgtccttgactccctcgccggtgacggcgaggccggtgacctgaggcacctccggcatctcaacgccgacgaaccgggcgtccgcccaatccgcgtgatcgccccacgtctcgctgcccgcgccgacggccagcgtgatggtcttggcgccttcggggatgtcgacggagaccttcgccatcggcgtgtcgtgctgcatcgccgtcttctcgaagacgacctcaccatcgatcatcacctggaagtcgacatttgcgtggtcgcggtcgacgccggtcagctcgcggtccacgccgacgtacgcctcgaagcggatcgccccgagatcggacacgtcgtacacgatgcgcgaggccgcgtgggtgccgatgcccttgtcgaacgtctgctccttctcgccgtcccacagcgtgatcgtgttgttgccgcagctcttgtccttgcgcaccgggttggtgttggggtcgccggacgtggccgactcccacgccagatcggaggcgtagacgctgtccgtgccggtcacggcaaccttataggagacggtgctgccgccggacgtgacgtccagctcgaacgtgttgtcgccctggtatacggtgacgtcccgggtgaggcttccctgctgcgcatcgccgactgggaccctcttcgagccgttcacccgcatcagctgcaatgtggcagtcgggtcgaaggacgaggcgacgacctgcgtcttggagcgcatcgtcgacgccgtatactgcaggcgtccgtgctccaccgagatggcgttgccaccgaccgacagcgctgccagacccgtgtcaacgccgccaatgcggtcgatcacgaaacggtaggtgttggcggtgatgccgtcggtcgcggtgaccgtggcttcgatgacgttgcggccacgcgccagcttcacgtcggcgcccgtggcgtcgatggccttgccgttcaacgtcgccttgacgctggcatcggcatccgtcgccttgaacgccgcgcgtgcggtgagggccgagtccgcgccgaagtagtacagcgtgcccggcttgaagtcgaacgacttggacaggccgtcgatggtggcggacgacagcgtggccaccgaggacgggtgcccgtccagcgggtcggcggacgtgccgggggtcggcgccgtggcggtcgaggcgctcacccgtacgttgacgacggagccgggcatgcgccgggcgccggcgatgacgtaggtgcggaccgttgtctcgccttcgccgaccgcggtgatcgtgccgtcctggtcgaccgaggcgaccgccgcgtcgtcggacacgtacgcgatgctgccggtgacggggacgagaccgtccgcgccgaccttggccgaatcgtcgctgacgttcacctcggaggcacccatattggccaggtcgataccggccttgacgccgacgtcgtacgtgttgccgccgaacacgacctgcttgcatccgttgaacatgaacaggcgcgatcccgacacctggctcaccgacgcggtcgcatcgattcggcgggtgtctccgacggcgagcgccacgtccgcgtcgccgcccagcgtgaccgtatcgtcggggttctcacggtagatcttgttgtcgcggaaggtcaggtcgctgacgctcttcgcgttgagcacccggttgccgttgacgtagaaggtgttgccttcgatcgtcatgttcttgtgcacggtgtcggtggtggacacggtcgggttcgtcggctccaccaggatcgcgtcggatccgctgcggcggaacgtgttgccgcggatcgtcacgtcgcgggtcgggccggattcgtaccagctctgcgcatcgttggagatgtagatgccggccatgcccatgccgtcgaacaggttgttctcgatggtcaccttcttgcgggtggtgaccaggatgccgcgggtcggcgtctccttgaagacattgtcgtggatgttgacctcgggcgtatacgtgatgttctccaccacgtggctgttgaccgcgacggcggaggggatggcgctgtcgagcgtgaggacgatgtcggtcaggctgcccgaccccgcgcccatgtcaccgccctggccgtcgggcccgtcgacggcggtgacggtgcgcacggagtcggagaccgggagcatgtcgcccttggtcatgaactcgacctggtcgccgacgaagaacgacgggaatccggcggtctcgttgtgcatgtagcgcaccttgatcttggtgtcggagatcttctccaccacctgcaggaaggtgccatgcacgttgatcgggtcgtcatgcgggttggagaagctggagttcacgacggtgatgacgcccttgcagcccgacatctgcacgaagtcggcgtatcctgcggtgctgcggccggtgccttcgccggtgccgaagttcagcccgtccatcgtgatggtgtcggtcgactggccgaccacgccgaagccgtgcaggaagcggaagtcgatgcccttgagcgtgacgtccttgtccttccacaggaacacgcccgggtggtctcgcgtggtctgtcgcatctgatagctgatgcccgtggcgttggcgagcttgtcgctcatcgacgagtacgagaagaccagccggtggttgccggcgtcggtgatgccggtgacgttctggaatatggggttggtccatacgtcgccgcgcacggtcagtccggtcttcgtgtcatagagctgcacgtacggcagggcgttgcttgccgtccagtacgtggcgccggtgtacgggctggaatcggaataccattcgatgttcgagcccgacagcctgtagttgtattcctcgggcacgtacacggtcgcggtcttggcgcccgcatccaccttttcgacggtcaggtcgatgaccgtcggcacctggaagtccacgctgaagttcttgaacgtcacgtttcggctgttgatggccgcgaacgtcgtcatcttgccgtggaacacgaaatccgaaccctggccgtcgacggtgatgttcttcgtgtcctcaagcaggatgccgatcttcttgtccttgtaggacgagttcgtgccgacggtgttcgatacgtacagggtgcgctgctcggccttgtcgggatagatgtcgtagcgccccttggggaacgcgatggtgacgttcttaccttcggcggcgagttccttggccttgtcgaccgccttgatgattgcgggggcgctgtcttcgccgctatcggcggcggccccgtaatcggcgaccgagacgacgtctcctccggccgcctgcgcggtgttcgtggagaacaacggcgccaggcatatgagagccgccgctaaggccgccgtcaccccccccccgccgctctcctatacgctctcctgatatccagcacgactcatggtgcttccttccctcaggggttgtcgattatgacaggcgcggcaaggaaggcgacctctatgccgtcctcacaccgcagacggaaccgcacaggtatcatccatgatttttacggctcctgattatgtaaactatattggcattacattaagacacggcgtcgaaacgtcgaaatacggtatccccccggtggcacaatgagaccatgactgaaaccagcgcttttgcaagttccctcccctcccatcgcccgctgggcacgccgctgggggcacatcccacccgcgtgctgttcctcggctcgggcgagctcggcaaagagatcaccatcgagctgatgcgtctcggcgcatgggtgtgcgcggccgactcgtacgccggtgcgcccgcccagcaggtggcgaacgaggcacgcgtgctggatatggccgacgcggcccggctgcgcgcgctgttcgacgaggtgcgccccgacatcatcgtgccggaggtcgaggcgatcgcgaccggcgagctgtcggatgccgcggcgcgcggcgtccaggtggtgccgagcgccgaaatcgccgccatctgcatggaccgcgagcggctgcgcgtgctcgcgcacgaggatctggggctgccgaccacgccgtaccgtttcgccgggtcgttggaggagctgcgcgccggggcgcgggaggtcgggtacccgtgcgtggtcaagccggtgatgagctcgtccgggcatgggcaatcggtcgtgcgcgtggcggacgcgatcgacgccgcatgggtcgaggcgcaggagggtcggcgcgccgccgacgagggcgacgtgtcgcgcgtgatcgtcgaggcgttggcgccgctggattatgagctgacggtgctgacggtgagctcgtcggccggcgtggtcacgtgcgcgcctatcgggcagaggcaggaaagcggtgactaccgggaatcctggcagcccgcggcggccgatggcgaggtgctggaaagggcgcgtgccatcgcctgtgccgcggtgcaggggctggtcgacaaggccacggcatcgggcgaaaccggatggggcgtgttcggtgtggagctgttcgtactgaccgatggatcgatcctgttcaacgaggtctccccccgcccgcatgacacgggcatggtgacgctgatctcccagaggctgagcgagttcgcgctgcacgcgcgggcgatcctcggcctgcccgtcaccgaaaggcatgtggcgctggcgatgggcgacgggcagaccgccgcgagccacgccatcgtggtcgccggcgacggcgaggcggaattcaccggagtggagaacgcgctggccgagcccgacaccgacctgcggatcttcgccaagccgcgagtgcatggacaccgccgcatggccgtgtcgctggccatcgggacggacgccggtgacgcgcggcgcaaggccgccgatgtcgccgatgcgctgaccatcaccgtgcgctagcgccacacgaagaccgtggcacatctttcatctctatccggcgaaagtcccatccggttcaactccaatgggactttcgccggataacacgcagctgagcacacagccaaacgcgcgaccaaacacgcgaccaagtacacagccataggcctccttcatcccgtcaaagtcccgtttcggacggtacaggtgggatcatgcgcggatagcagccgcagcgagcgtgttagcgctgcgcatgtagccgcccattggtattcttttaccgttagttcacccagaaattccgctcctcaagcatgatttggaaggcgattatggagaaattggaaaagctctacgagggcaaagccaagcagctgtacgcgaccgacgacccggaggtcctgtgggtcgaatacaagaacaccgccacggccggcgacggcgagaagaaggaggacttcaccggcaagggccgactgaacaacctcatcaccacgatcatcttcgacctgctcaagaagcgcggcatcgacagccacctgatcaagcgcgtgaacgcgaccggccagctggtgcgcaaggtgaacatgttcccgctggagatcgtgctgcgcaacgtcgcggccggccacttctgctcccgtctaggcgtggaggaaggtctgcccctcaaggagccggtgctcgaatacttcattaagaacgatgacctgcatgatccgttcgtcaacgacgacgatctggtcgccctgggcgtgtgcacccgccaggacctcgccgagatcgcgccgctcgcccgcaagatcaacgaggccctgatcgagatcttcgccaagatcgacgtcaagctggtggacttcaagatcgagatgggccgcgcgtccgacggcacgctgctgctcgctgacgaaatcaccccggattcctgccgcctgtgggatcagaaggatcactccggcaaggtcgagcaccttgacaaggacctgttccgccgcggcctgggcagcatcatccccgcctacgaggagatcgaggagcggcttgccgagctcgccaagtccgagggcatcgaggtcaccgagtaattcatccaagcgcaagtagcagaacataatgttggctcccctctggaggggagctgtcgccgatagacgactgaggggaggttaaggcgttcactgccatgacatctcccctcattcagcttcgctgacagctcccctccagaggggagccaagttctttcaccacgcctcttcattttttgaataacttcttaagaaaggattcccatggtttttcgcgtgtacgtggagaagaagcccggcttcgacgtggaagcccagcagctcggcaccgaactgaagaccatcctcggcatcgatggcctgcgcaaggtgcgcatcgtcaaccgctatgacgtcgagggcatctcccaggagctcttcgaacaggccacgcctaccgtgttcagcgagccgcaggtggatgacgcctccgcggacctgcctgacttcggcgacgcgacggtgttcgccaccgagttcctgcccggacagttcgaccagcgcgccgactccgccgcagagtgcatccagctgatctcgcagggtgagcgtccgaccgtgcgctccgccaaggtgtacgcgctcgaaggcacgctcagcgaggccgacgtcgatgccatcaagcattacgtgatcaaccctgtcgaggcccgcgaggcgtcgctggaagccaagaccacgctgaagacccaggtgcccacccccggcaaggtcgagaccatcgccggcttcaacgagatggacgccgctgccggccagaagttcatcgacgagcgcgggctcgccatggatctggccgatcttgagttctgccagaagtacttctccgaagagggacgcgagcccacgatcaccgagatcaaggtgatcgatacctactggtccgaccactgccgccacaccacgttcggcaccgaactggacaaggtcgacatcgacgacgccgcggtcaaggccgctttcgaacgctatctggagatgcgtcacgagctcggccgcgacgccaagcccgtgtgcctgatggatatgggcacgatcggcgcgaagtggctcaagaagaacggcatcctcaccggtctcgacgagtccgaggagatcaacgcctgcaccgtcaaggtgaaggtcgacgtcaacggcgaggacgaggactggctgttcctgttcaagaacgagacgcacaaccaccccacagaaatcgagccgttcggtggcgcggccacctgcatcggcggatgcatccgcgaccccctgtcgggccgctcctacgtgtatcaggcgatgcgcgtcaccggtgccgccgatccgaccgtgccggtctccgaaacgcttgaaggcaagctgccccagcgcaagctcgtgaccaccgcggcctccggctacagctcgtacggcaaccagatcgggctcgccaccggccaggtcgacgagatctaccaccccggctatgtggccaagcgcatggaggtgggcgcggtcgtggccgccaccccggccgaccatgtgcgccgtgagaccccggcccccggcgacaggatcatcctgctcggcggtcgcaccggccgtgacggcatcggcggcgccaccggctcgtcgaaggctcacaacgtggagtcgctggaactcgacggcgccgaagtgcagaagggcaacgcgcccgtcgagcgcaagctgcagcgcctgttccgccgcggcgacgcctgccgactcatcaagcgctgcaacgacttcggtgccggcggcgtgtccgtggcggtcggcgagctggccgacggtctgtacgtggacctcaacaccgttccgaagaagtacgagggacttgacggcaccgagctggcgatttccgaatcgcaggagcgcatggccgtggacgtggcagccgaggacgtcgacgagttcctggggtacgcccgcgaggagaacctcgaagccacggtgatcgccaccgtgaccgaggacccgcgcatggtgatgacctggaacggcgacaagatcgtgaacctgagccgcgagttcctggcgtccaacggcgcctccaagcatcaggtcgtgcgcgtcgaggagcaggaggcgtacgaggtgcccgcctcgtggcgcgaaggctcgctggccgaccgcatgaacgcggtcgtcaccgacctcaacgtggcatcgaacaagggtctgtccgaacgtttcgattcgacgatcggagccggaaccgtgctcatgccgttcggcggacgcaagcagctcaccccgaacgaggctatggtcgccaagctcccggtgttcggcgagaccacgaccgcttcggccatggcgtggggcttcaacccgtacatcatgtcgaagaaccagttcaccggcgcatacctgtcggtcgtcgagtcgctgtcgaagctggtcgcggccggtttcgaacacgagaaggcgtacctgagcttccaggagtacttcgagaagctgcgcgacgagccggaacgctggggcaagccaacggccgccgtgcttggcgcgctgatggcgcaggtcgacctcggcgccggcgcgatcggcggcaaggattccatgtccggttcgttcgagaacctcgacgtgcctccgacgctgatctccttcgccgtggccgtaggcaacatgaagcgcgccacctcccccgagttcaagggtgccggccaccgcatcgtgcgtatcgcgccgcgttacctggccgacggcctgaccccggacaagaatgcgctgcttgaggcgttctcgctggtcgaggagcttaccgacccgtcgcatcacatcgcgttggccgtctccacgccgggctacggcgcgactgccgaggcgctgttcaagatgacgcttggtaaccgcatcggcctgacgctcaacgagagcatcgccgcggacgacctgttcaagcctgcatacggctcgttcatcatcgagctggcggacaacgagaaaatcccggtggcctccaacctggtcgaggtcggcgagatcggcaccaccaccgccgagtacgtgttcaaggcggcgggcgagacgctggatctggcgaacgtgcaggaggcgtgggagtccggtatcgaatccgtgttcccataccgttccaagagcgacgaagccggcaagagcgtcgaaaccatcacattcgacgcgccgaagaagaccgtgtacacgggcgccggcgtcgccaagccgcacgtcgtgattccggtgttccccggcaacaactgcgagtatgattccgccgccgccttcgagcgtgcgggcgcggacgtgaccacgctgatcgtcaacaacctgacgccggccgccgtcgccgaatcgacgcaggcgctggtggacgagatcaacaagagccagatcgtgatgatccccggcggattctcgggcggcgacgagccggacggctccgcgaagttcatcaccgcgttcttccgcgcgcccgcggtcaccgaggccgtgcgcgacctgctcaagaaccgcgatggcctgatgctcggcatctgcaacggcttccaggcgctcatcaagctgggtctggttccgtatggcgacatcgtgccgatgaccgccgaatgcccgacgctgacgttcaacacgatcggccgtcaccagagccgtctggtgcgcactcgtgtcgcgtcgaacctgtcgccgtggctgtcgcgcacggccgtgggcgacgtgcacaccgtggccatctcgcatggtgaaggccgcttcgtcgccgccgaaccggtgcttgacctgctcaaggccaacggacagatcgccacgcagtacgtggacgaggccggcgtgcccggcatggacctgaccgtgaacccgaacggctcgctgctcgccatcgagggcatcaccagcccggacggccgcgtcttcggcaagatgggtcactcggagcgctccggcaacggcctgtacgtcaatgtgcccggcgacaagtaccagccgatcttcgaggccggcgtcgggtacttcgccgcgtgacggtgatgactgactgataacagactggggcgggaaccttctcgggttcccgccccagtctgttgttgatgaagtatggcctccgcgcgatacgcggcggtatgaattactcggcctttgagggcgcgacaggttctgcgaccgccgcaccgttcgccacaggagcgctgttaacaggagtgctgttagtagtgttgttggccagttgctgatgcacggtcttcgcgatgtgacggctgaccatgaaccaaatcgccccggcgacaaccacgacaaacgaaatcggatagatatactcagcgattccgtatccatactgcgaggaaggcagtacgccacgatcgtcaaaatcccaacgcagtgcatagaaagcgactacagcaagcaccgagaatacgatggccgcgatcggcttcttcaacactccgaacagcagaataagcagcgaagacaccgcgatgaccgccatgagcgtaatgcatatgacagcttccaggtacatgccgccgagcagcttcccggactggagacccgcgatgtagatgcgcaggaatgtcagcagcgacagccccaccacatccttgttgtgtagaccggcttccgcggtgtatacccgatcaccatactgcttcaggtattctgcataatcgccctttgctgaggcgaacggcaggaagaacgacaccgccatcgccactgcgccgaccaccaacagcacatacggaatgagctgcttggcggggagcttcttcgagacctgttggccttgtgctatatctcccatattgtcacctttctttcctgtgttctcgtatcatgtttgatgacgggttgtgaccgtgcacgtgatactgtgcacgaagtgcttagtcatcgggtatcaatcacttgggattggtcgtcgtcacggtcaccgtgtacattccggcttcagcagtaggctcatacaagcgctcgatgacatctttagcctgtttattggcaattttcagcagttgtgttcggtctagccgagcttcggtctttttcttggcgtcttccatcgcagctttagtgtcctctacatccgctgcgttaaagaaggaatcagacttgtcaaagaaacgcagtgaatcgggattgacggccaccgactggattttcggtgcaggtagcgtgatagacactgttttggagtccttgtcgatttttatctgggccttggccagatcgacccccgcgcgcacctcgtatgtgtagaacatcgtgaactgcttcttgttcaggaacgcaataccaccgtcttcgtatttctcgaagccgtaatccgtttccttagccgtggtaagatcctgaatcttctccagctgcttaacgacgacttcattggtcaattcctgttgaggattgaagaacttggtgatggcaccacgaatccatcctccggcgaacataaagatgacggcgacgacgaccgccagaatgattgttgctttcaggctcatcttgaatgatgagccatctttgtcgacgcgtgcgcgcatttttcaccttttctctttcatactctcgtcatctcaattcatgtggcatctgatgcaatccagttctggcatacgtctacaaaatgtatgggcaaaaccgcgacgagacatcagtcgtcgactgaattcgagctggttctcaccggttatgcaacacattagcgatgcacaatcagcaacacaataattataacgtaaatactgcgacataatgctatatctgagcttggttatgatccttgtgctggcaacgttgccgaaccatcatgcaccggtcggtatcaacacgagccgcataagaagggaacgacaatgacatcaccgagaagttcgatttcccagtatctcccgcgaaattgcacgaagccgtccgatccatgttgtcatgcggcgccgcattctcactacgcgaagcaaatgacaccgaaatgaaaacgacattcactccttacgacagcgacgatgtcctgacagcaaccgtgaacggcagcggtgacgagtcgaagataacgctgtctgcacaagactcgtcgaatacaggggcgcgcatcatgcgctttgccaccgatttggctgcccggtggaaaggggcgaaggccggagccgtgattggcggggagcgtacaatgtgggatatgagcgagcatgtggagcatggattcggcccggtgtgggacagtgaatcgcggattctggtactggggtcgatgcccagtccgaaatcgcggaaggcggcgttctactatatgcacccgcagaatcgcttctggccggtgatgcaggcgttgttcgccgacccggcggatccgtctgatgtcaccggcgactcgctgcaatcccgccgcgcattcgcgatgcgccaccatatcgccttgtgggatgtcatcgcgtcctgcgacatcaccggggccagcgacgccagcatccgcaacgccacgccgaacgatctgacgcccctgctgcgcgatgcgccgatcgctcgcatattcaccaccggagcgaagtcggcgcaactctatcgcagactcatcgaaccacgactggccgcaaccggcatcaccatcggcatgactccgctcccctccaccagtccggccaacgcctcgatgcggctgccggcgcttatcgaagcctaccgactggccttccagagcgcaggcgctcttgaaatggcggatgaaacggtcactggtctctgacgcgatcgcggcgtggacggcggtgccgggcaatcgacgcgcccaaccggcagaccgggatgagatacaggaacggcgccgcgaatcgtcagcctcagccgaatgatatgcgccggagcacaactgatgggcgcaacgatcaattgcggcattggctggcggacggcaatctcgatgtggcggtggcggatttcaccggcatgccgaccggcgtggagctggtggatttctatcaggaacgtatggtgttggtcatcgcgaactcgctgtgactggatctcgccggcggcgggaccgccatcggcgccggtgacctgtcatccttggagcgctgcccgttcctgctgggcaatccgcaggacatcgacggacgcatcggcgacatgctgttccgccgagccggattcgctcccgtggctgcgggccgggaacctcatacgcgatcagcttcggcatatccgcctgcgactaccggtggagcgcggtcgatgatttcatcgaccgcgcgcgccggagcatcagcaccattgaccggcatgattccggccggaaccgtcggatcacgcctgatagtcgttgagcatggcctcgatgttgttgccgtcgggatcatggacgaacgcggcatagtagcccggcccgtagttcgggcgcggaccgggcttgccgttgtcggtgccgccggccgcgagacccgcctcatggaacgccttgatggcatcggcggtcttggcgcggaacgcgacgtgtgacggcacgaccggattgccgtccttcggcgattccagccagatgccgtcgccgtcctcgtcgttggcgaagcataccgcagtcgggtatgcggccttcttgacatagcccagcggcgccagcagcttctcgtagaaatcggcgcgcttggcggcgtcggcgacgaacagtccgatgtgatcgatcatgatgaacctcctatgaccatgtggatgactattccattatccttgcgtcgctcgtgacgcgggtgaatatcagctttgggtaaagccccgtttcaggcgccgaaatcggtgtcgccggcggcgtcggcccgggccacggcagcctcggcatcgcatgcggcctgttcgatgacccgctcgtagccggtcaacgcggcgaacggcatgaactgggcggcccgctgacgacgggacatctgcggatgcctgcgcgacacgtgatgcggcatatcgatgatgtcgtcatatttatgcgtctcatgtaatgccatatggactccttttcacgcccgatagcgcaatacgctcaatacgctcatgcacgatggcctccgatctgccgattgcggtcctggccggtggcgccgtcctccatgtccatcgccttgatgacggcattgcggccgaatttcctcttgacctccagcaatgcagtctgcatgtcatgctcacgccgcacatcactgttcgaaatgccggcatggccatcgtccccctcctccgcggacgaatcgatctgggaaaacaaatcaagctgctcgtagcgtttgccggccgcaagctcattcgccgtggccacatcatcggcgatgacggtgagccggcgcaccaacagacgcggatccacgatgcgctcgtacagcatcgtcatcgcctcacggatgcgagtggaagacgaggtgaactcccccagtccgatcgacccggtggccggcttggggacccgccgcccataccggtcgacggacaccggcccgcgatagctcttgcccgcctgatcggaggcccgtttcatcgccgaatccgcgcaggaatccagtttggtcgagtcaaggctgccgatgtcgtaaccgaccgcgagcgtcagacgattcgtcagcacccgcttgccgacaagatccaaggcgagcgcgtccgccatctccttgacgatgagccgtcccgtagcatagtcggcgggcccggtgagcacctgcccactgctgatgctgtgcgcatccggctcatacgattggatgtccgcgatcgtgcacggctcccagccccacgcatggtcgatgagcagttcggcgttcctgccgaacatgcggtagagcagatcctcgttgtagtagtcggaggcccggccgatcgagcatcgggcgacatcccccatggttagcaggccggcatgctcaagcttccgggcatagccgcgaccgacccgccagaaatccgtaagcggacgatggttccatagcagtcgccgatacgacatctcgtcaagctccgccacacgaacgccatcctcatcggcgggcatgtgcttggccacgatgtccatcgccaccttcgccagatacatgttggtgccgatgccagccgtggcggtgatgcccgtctgcgcgagaatgtcacgcacgatggcactcgccatctcgtgcgggcccatgcccagcgcgcgcagatagggcgtggcatcgatgaacacctcatcgatcgaatagacatggatgtgctcgggcgcggcatatcgcaggtacacgccgtacaccctgccgctcacctccaggtaatgcgccattcgcggcttggcgatcaccatcgacgccttcaatctcggggaatgttcaagatcctgagaatcacaggattcaccggacagccgtccgccgggagccagcatcgcccgctcggcgttcaccgatgccaagcgctgccgaacctcgaacaaacgtgcgcgtccgggaatgccatacgccttcagcgaaggagacacggccaggcagatggtcttgtccgtacgctcctcatccgccaccaccagatgcgtgcgcagcgggtcgagaccacggtcgtgacactccacggaagcgtaaaaagacttcaggtctatggcaagatacacatgctcgccccgaaccatcgtcaccaccccctttcgcgctttcgtttcagagtacaatcattatgagacatatgttcgatagtatgtcgccgcccatgaggcccatctgccacacccccaagcgcggatgtagccgccgattggtactgtggataggtagcgaatcccctgtctcccatgttttggaaggagctttggcttgtcagctgaactcgaagacattcacgaagaatgcggcatcttcggcgtatggggtcacccggacgccgcccgcctgacgtatttcggactccacgcactgcaacaccgcggtcaggaaggcgccggcatcgtctccaacgaccacggccatctcatcgggcaccgcggcctcggactgctgacccaggtgttcggcgacgagcgcgagatcggacggctcaccggcgacaaggcgatcggccacgtgcgttatgccaccgccggatcgggcaccaccgacaacatccagccgttcatcttccggttccacgacggcgacgtggcgctggggcacaacggaaacctcaccaactgcgtgtcgttgcgtcgcaagctggaggacgaaggcgcgatcttccactccaactccgacaccgaagtgctcatgcacctgatccgccgctcctccaagccgaccttcatggacaagctcaaggaggcgctcaacaccgtgcacggcgggttcgcctacctcatcatgaccgaggacgcgatgatcggcgcgctcgacccgaacggcttccgaccgctgtccctcggcaagatgaagaacggcgcctacgtgctcgcctccgagacctgcgctctcgacgtcgtcggcgccgaactggtacgcaacatccgccccggagagatcatcgtggtcaacgaccacggctacaagatcgtgcagtacaccaacaagacgcagctggccatctgctccatggaatacatctacttcgcccgcccggactccaacatctacggcgtgaacgtgcactccgcccgcaagcgcatgggcgcgcgcctggccgaggaatccccggtcgacgccgacatggtcatcggcgtgcccaactcgtcgctgtccgccgcgtccggttacgccgaggccgcgcacctgcccaacgaaatgggcctgatcaagaaccagtacgtggcccgcaccttcatccagcccacgcaggagctgcgcgagcagggcgtgcgcatgaaactgtccgccgtccgcggtgtcgtgcgcggcaagcgcgtcatcgtcatcgacgattcgatcgtgcgcggaaccacgtccaagcgcatcgtccagctgctcaaggaagccggcgccgccgaagtgcacatgcgcatcagctcgccgccgctcaaatacccgtgcttctacggcatcgacatctccaccaccaaggagctgatcgccgcgaagaaatccgtcgaggagatccgcgacttcatcggcgccgactccctcgccttcctgtcgctcgacggcttggtcgaatccatcggcctcaacgcgcaggcaccctacggcggactgtgcgtcgcctacttcaacggcgactacccgaccgcgctcgacgactacgagaccgacttcctcaagtccctcacccccgaggaccgtgtccgtctgcccgaattcgcgctctacaagagcaagtacgaaggcaacgagtacaccaccgcgccgacgcagcaataaaggcgttccagcaccacagaccaatcccaatcccgacacaacccaacaagcatcatccaagaaaggtacgtcatgccacaagcatatgaaaacgccggtgtcagcgtggaagccggatacgaggtcgtcaagcgcatcaaatcgcacgtcgcccgcaccaaccgtcccggcgtcgtcggcggcatcggcggcttcggcggcctgttcgacctcgcgtccctcggctacaaggagcccgtgctgatctccggcaccgacggcgtcggcaccaagctcgtcgtcgccaagatggtcgacaagcacgacaccatcggcgtcgactgcgtggccatgtgcgtcaacgacatcgccgcccaaggcgccgagccgctgttcttcctcgattacatcgcctgcggcaagaacgatccggcgctgctcgaacaggtcgtctccggcgtggccgacggatgcgtgcagtccgaagccggtctgatcggcggcgagaccgccgaaatgcccggcatgtatgacgaagacgaatacgatctggccggattcgcggtcggcgtggccgaaaagtccgccatcgtcgacggctccggcatcaccgccggcgacgtgctcatcggactgccatccaccggcgtgcactccaacggcttctccctcgtgcgcaaggccctgttcgagcaggccggctataccgtcgacaccgtgctccccgaactcggcggagccaagctcggcgacgtgctgctcaccccgaccaagatctacgtcaagacactcaagcccctattcaaggcaggcgtcgtcaagggcgtcgcccacatcaccggcggcggtttcatcgagaacatcccccgtatgatccccgacggcctcgccgccgacatcacgctcggatcctggcccgtccttcccatcttcgacgtcctggaacgcgccggcgacatcgaccacaaggagatgtacaacatcttcaacatgggcatcggcatggtgctcgccgtctccgccgaacgcgccgacgagacgctcgccctgctcaaggacaacggcgaagccggatatgcgatcggcacgatcgtccccgacaccgacggcacgcagatcacgctgaagtaagcatccactcccgcactccccactgatggggagtgcggtcacaagcgaatccgggggtggccggcaagccccccagtccgtctgcaacggacagccccgccagcggggcctgaagaaaggacacatcatgggtcagaaagtcttggtcatcggctcgggcgcacgcgaacacgccatcgcgcacgcgctgctgcgcggcgacagcgtcagcgaagtcaccgtcgcctccggcaaccccggcatggaactggacggcatccgcaccacccaaatcaacgaatcaaaccacgccgccttcatcagcttcatgcagcacaaccagtacgactgggcgttcgtcggccctgaagtccccctgatcgaaggactcgtcgacgacttcgccgcggccggcatcaaggccttcggccccaacaaggccgccgcccagatcgaaggctccaaagacttcgccaagcagctgatggcccgccacaacatccccaccgcccaataccgcaccttcgacaacctcgaagactccgtcgcctacgtgcgcgaacacggcgcccccatcgtcgtcaaggccgacggactcgccgccggcaagggtgtcaccgtcgccatggacgtcgacaccgccatcaccgctctcgacgacatcttcatcgaccaccgcttcggcaaggccggcgccaaggtcgtcatcgaagacttcctcgaaggccaggaattctccctcatgagcttcgtccgcggcaccgaattctggcccatgcccatctcccaggaccacaagcgcgcctacgacaacgacgaaggccccaacaccggcggcatgggtgcctacagccccgttccccagatcggccaggacgtcatcgacaccgccatcgacaccatcgtgcgccccaccgtcgaagccatggccgccgaaggcacccccttcaccggcatcctctacgccggcctcatcgccaccgccgacggccccaaggtcatcgaattcaacgcccgcttcggcgaccccgaaaccgaagtcgtcctccccaagctcaccagcgatctcggagcagccatcagcgccatcctcgacggcggcacccccgccttcacctgggacagcgacaacgccaccctcggcgtcgtcctcgcctccaacggctaccccgtcaacgtcatcaagggtgccaaaatcccctccatccccgtcgacgacgcctcccacgtctactacgccggcgtctccaacagcgaccaaggcctcgtcgcctcctccggacgcgtcctcctcatcgaaaccaccgcccccgacctcaagtccgcccaagacaaggtctacgcaatcatcgacaagctggacacggagggaatgttttaccgccacgacatcggtgccaaagcactgaagtgagttgtgcggcgcatctgctgcgttgcggagcgctcgaagtaccatcgtacgtccgtcgcattccgcgccttgcatctgcaccacacaactcacttcaggcggtaaaaagccgtgtatggcatgcctatgaaattgcccccgctagtagcgggggcaattgctattttgtgaggccttacggcagatccatgaagtcggtgtctttcagatagtttttgccggccgtgatgtcgtactggatgagcttgtaatcggtcatcagctgcttggtctgctcgtcgaactcgtcctcggccatcgggttgcccgccgcgtcaagatagatatcctgcccctcggggatgcggtcccatccctggatcttgttgaccaccggcggctccatggcggagaccttcttgtgcatgagcgtcaggaacgccaggtacggcgacaccttcgcgttcatgtgctccgcagtctgcgccacgaaatagttcggcgacgagtacacgctgttgtcgaccttcttgccctgcgagccggacgccttgttggaccatatgaaataatccgtcaaatgcagcgccagcgaattgttcgtatcctggctggcggtttcgtagatgcccggcagatggtcgccatagaacacgaccgtcaccggcttgtcgagcttgttgagctcatcgaggaagttcttcgtctccgtatcggtgatgctcgcgcccttcgcatacgtgtcgatggccgtcacttcgtcggagccgagggaatcggcgccgtcggccgcggtggccttgaactcgttgtcggcataccagtcgttgtacggcatatggttctgcatcgtgatgatctggatgaactggttcgaatcggtcgagctgatgtcctccaacgcgctctgatacgtggccttgtcggacacgtacggggaacggtcgatcttgtcccgatgcttgatgatgtcgtcgccctgcagcgtgtagaaatgcgcgaatccgaacttcttgtagttcgtcgcgcgcgaatacatcgacggctcatacgggtggaaggcgatggagttcttcggagccccccacatctggttgatcgtcggcgtccaatgctgccccggtaccagctgctggtacgggctggtcagagacgagtcgaaattcgccatgctcaggcccgacaatcccatatactccaggttcgcggtgccgccaccgtatccggacgacagcatcagaccgctggtcgtgccggatttgatggcacggacctccggaatggcgtccttgttgagcttcacaccgggtacgcgcgcggggtctgagaacgattcggacagcacgtagaccaccgtcgaatcggtcatgttcttcgtgcgcgaggcgttgatcttctcggcggcggcctcgtacctcttgacgacctccttcatcgtggcctcgctgtaatcgctcggctcatccatgatcgtcgggttgagctgccgggtgaacgagaccagcggaccgttgcgctgcgcgtcatacacggaatcccacatcgaaggagtgtcgcccagggccttggaaaaaccgttcgcccacgagccgacagtgctgacctggtcacagtacaggccgaagaacaacgacggcagcaggaacaccatcagacggattccggcggccaaccccttgttgtcgaaacggatcatgcgaccatgccggccatcgacatggttgagcaccacgaacagtgcgacgaacaccaggaacaccgcgagtgcgccgaggatgatccaatgggcccccggaggggtgaaactcatcagattgccggtattcgagccgaggaagcccaggtcggacggcagaatcgcctcatagcgtatggacaccttgaaatgctcgatgacgcccacgatgatggccacggccagcagcaccggcgtggctatccagaaccggttgaacagcatgagcagcgccagatacagcgcgccgatgagcagcaggttcagcacgaacacgaagttgcccttggtccacatcttcgacacgaaaccccagcccacgacgggactggacagctgcacgcgcgtgccggactggctgacgccccactgcagcgcagcgaccgccgccatgtcgaacaccacgaacaggacaccgtacagccagccggggaacggcttatactcacggcgaccgccgtttctgccgcctttgccgccgttcctgccggaagaggagtcggcccgcttgatatccagcacctcgatctcgccggacgggctgacggcatcggccacgttcgtaccgtcgtcgttcttgtcgtttatttcgtcgctcatatacccgcacttcgtgtgattcgcatggcgccatccgacccatgcccaattcgttatcggccatatacacgtcatcatggttcttccgccacgtcacgcgcggaagggaacggccatgcgccgccatgatgaataccgaatgacattctagtaaagaaacgacgacaatggtacatcacgttcactgatatttccctgaatctccccgtatgagaccagtctgagacccgtatgggccactcgccgcccgttggaatccgcgcggaagagccccgcatgatccgcataagtgggccccgtatacagcatcgggcaatatcatccctgagacggacgaaaggcgccgggtcataccgggtaatatcaaccgatgacacttacaagggggatgatcgcatggaatcgttgccgagttgggtgacgaggttactgcatatacgactcgtctcaggcccgttgccaaccacgatatgggtgattgtcggcgtgggagtggcgatattgctgctgtggcaggtcttcaggagcgatcggtccaagctggcgaggcaggtgcccatcatgcttgtctgcggtggcttcggcctgctggtcatgtggctgctttccgaaaaattcatggtattcggcgtatcgctgggctggcccgtcatcatggctgcggccgcgtgctgcgcgctgttgggactgctggtgacgaccatcgtgcacgcccggcgcgcacggcgcctgatggccgcggtgctcatcccattcgtgctggtctccaccgcgctccgtatcgactcgatttacggggagtatcagaccatcggctcgctgatcggctattcgtcatatcatccgctcagcacgtcgcacatgcagaaggggaccctgaccgtcgatgaatggctgcgagaggtgctcgatggcaaactgccgcccgccgccgcgcacggcaaggtctattcggtggacatatccaacacagcctccggattccgcgcgcgtaccgcggccgtctacatgccgccagccgccctgagcgacacaccgccagagctgccggtactcgtcatgctcgccgggcagccgggcaatccggaccgcgtgttctcggccagcggcatcgccgcgatcctggaccagtatgcgaaggcgcatcacggtctggcgcccatcgtcatctcgcccgaccagaacggcgacaacacggtgaacagcctgtgcgccgacacgaccaaggtcggacgcgcggagacgtatctgaccgtcgacgtgccacggtggatcaaagcgcatctgcccgtgtcccggcaggcgcgggattgggcgatcggcgggttctcgcagggtggcacgtgtgccacccagttgggaccgcggcacccggacatattcggctccatcatcgccgtggacggcgagctgaagcccaccgccggatccgtggagcatatggtcgccgaatatttcaacggcgaccgcagcgcctatgaggctcaagtgccggccaacgccatcgccgaccacgcgccttccaaccagatcatgattctgggggcgggcaagcgcgacgcgagatccataaaaaacgtcatcgtcaacggccaggccggtgtcaaggccggcatgcacgtcgtgaagatcgtcgtgcctgacaccggccatgactggcattccgtcaacgcgacattggaggcggcagtcccctggctgtgcgcgcaccgctggggtctgggcgaaacgggcctgacatggtccgactatccgagaatcgaggttctgcaatgagcgacacgaaagtcgaaccggagagcggcaaagaaagccgccgcaaatgccgtacccacggcaggatgcatgccttggtgcaggacgtgagcgtctggattcacgggcatcgcctcgcagtggcgttgtcctgcacgttcgcggggctcaacatcgccatgtggatcggcttcgcgctggccggccgtccactgcctctacgcagcctgcgcaccagcctgcaggagttcaacctgctgcatctgctggccacgctgctgctgacacgcggaatcctgcagctgctcgtcgacacgatcgcgctgttggtgatgttctccatcgccgagacgctgctgggccgccgccgcaccctgacggcggccttcatctgcacgctcgccggaacggccctgggactgctgctgtgcggaggcatcgcccaactgctgcagggcactccggtggtgggccgcatccgtttcgcgctcagcccgctgacgctgggcgtgggcgcgatgatggcggccagcgcgttcacccgccgcctgtggaggcggcgcatccgtctgatcggctatgtgtccattatcatggttgtgatgttcagcggtaatcccggtgactactgcctgctcgcggcggcgggattcggccatgtactgggcgcgctggcatccaagcggaagaccgtccgacagctggacgacgcttcggcggcggatccgctgcactggcagctgagcacgtcgtacgagacccgtcgcgtgttcgcggccatcgcgctggtactcacgctcggtccgatcatcgcgatctcctcaccaacccatatcggcccgttgagctcattgggactgattatgagcccggcctcacccgatgacggcaagctcgcctcctgccttgccggcatggcccgcaccgactgcttcttccagttcaatctgctgcgggtgtccatgcctggggcggtcctgcgttccctgctgccgaccgcggtgatgctcatcatgacctggggcctgtatcgtggcaggcgtctcgccgcatgggcgttcatcatcgtcgggctgggggaatcctgcatcgcgatgctgtactatttcgtggcgcctctgtcccacgcgccgcaggggttgcgttccctgctgctgcacggcgcgattccggcgagcatcgccaacgtgctgttgccaatggtgttcgccatcgccgtcgcctgctccatgcgccacttcccgatccgcacggacgcggggcgtctgcggcgaggcagcgcggcggtcgtcatcgccctggccgtctgcatcgcggcgtatctgggcttcggactgttgcgccccggcgatttccggcctccggcgacatggcatagcctgatgcatgagctgccgtcacggttcattcccatcgggttcctcaaccgcagcaggccgtcgttcctgccgcgtaccgtggccgcatcggtggtcgatcaggccgtgggactggtcttctggctcgtggtgctggtcgtcgcggtccgatggatgcgtgagatcctgctggtcgacggacgcgcccgcgccaacgccggccgcctggtggagctggatggcgagtcgatgagcttcatgaccacgtgggagggcaaccactactggttctccgccaccggacggtcggccatggcataccgggtgatccacggcatcgcgctgacgaccacgggcccgttcggcgaccgtggcgaatggtcgtccgacctgcgcgagttcgctcgtttcagcatgcagcagtcatggtcgcccgtgctatacagcgtgcatcgcgagcagcgcgaccagcttgccgccatgggctggtattcgctggaggtcggcagcgagatggtggtcgatccccggcaatggaagacgaccggcaagaaatggcaggacatccgcaccgccatcaacaaggcgaaacgttccggcatcagcgacgtgatgtcgaccttcaacgaagccccgaacgacatacgcgaacagatcgaggagatctccgagcagtgggcgcagctcaaggcactgccggagatgaagttcacgctgggcggcgtcgaggagctgcacgacccgcgcgtgcgcatcctgtacgcgatcgacgccgaggggacggtgctaggcgtgaccagctggctgccgacgtggcgcgacgggcgcatcatcggctggacgcttgattttatgcggcatcgcaccgacagtccgaacggcatcatggagttcctgatcgcgcgcatggcggagcggctgcgtgacgaggggctggagcaccccgagtgcgccgtcgagttcatgagcctgtccgccgcgccgctggccggcatgaacccgcagcgcgacaatgccgacgagaccggacatatggataccggcaccgtcatgctgcagcatgcgctgcagatcgtggcggattggatggaacccgcatacggattccactcgctgttcaatttcaaacgcaagttccagccgaccgaggagccggtgtacatctgctatcccgatccggccgtgctggcccaaatcggactggcggtcgtccgcgcctacgtgccgtccctgacggcgaaggaggccatgggcatgctgcgcacactgcagcggtagccggccatccggcctttcatgggttccggacaatcgccgtgacgcgcctgtgtgcacggcagggttgccacgcataaaaaacaacaatcgcaggatttcaccatcccaaccgtcctccccggcagccctgcgacgcattttggcgtgtctcccataagacgcatgttcggccgatgacgatgatcgtgcacccgccgcgtgaatccggatacggtcggcgtgtccatcatcttgcccgtatatgcgtccggcgggatttcgcagttccatcgcggacgagctcaactgttacacgggtcaagcgtcactgtgcgtgggtaccgtcaccgtgcgtgccctcgcagcgtgactgcgtcacggaaatcattggaaaataagggtttctaccgcccgcgtcactgtgcgagccctcgcacggtgacggtacccgcgcacagtgacggccagatcatccatcagacgaaacggcatccacatcgtgaaaatgacgccattccagcccggccgaatcggatgattcgttccccggagcccgtcgcgaagcaatcggagactgctccgaagagcccctcacggaatgatgcccctccatgcgcaaaagcgacgaggcccccgcaagaaggccccgccgttgaaggagatatagatagagatagaatcagcgcgccggcatcacgccttggcgaactggtcgacgagggcgctcatccaatcgagcaggttggtgtattccttcggcatctgctcggtgagctcgacgatcgggacgttggcgctcttggcggcaccggtgatctgatcggtggtggagttagcttcctgcgtgttgaataccagcatcttgatggagccgcccttgagggcgtcctggaacgccttgatgtcggacggggtgggctcgctctcgttggcggaggcctgcgcgtagccggtcggggtggcgtccttcatgcccaggtcgtcggcgaggtaccatgcgacggattcggtcgcggcgtacggcacatccttggtcttggcggaggcgtccttgatcttgctttccagctgatcctccttggcgtgccattccttattgagcttggcgtagtcgtccttgtggctcgggtcggccttctgataggccgcggtgatggcgtcggcggtgttgttgcgcaccttggcggagaaccagacgtgcgggttgtcgccttccttgatgccggcggtttcggctgcggtgaccagcgtggccttcgtcgcggatgcggccttggacgcccacggatcgtagtcggcgccgttcacgacggcgaccttcgcggtgccgaacttcgcgacgtcctggctggtgggctcgtagtcgtgcgcttcgacgttggtcttcgtcatgatgttggtgacgtcgacgtgggagccgccgaggtccttggcgacggagccccactggttgatgctggcgacgacttcgatggtgccgctgccgccttctcccccggcggtcttgttgtccttgctcgttccgcatgccgcgacggccaccagcatagaggcggccgccacacccgcgacggcgcgcctgatgatagatgaaatctgcatttgttattccgttcctctccggatgatgacgggctttctcccgttctttcggttcacagtatacacgttattgagatttattatcattatcgttatcaaatgggcgtgtcgcgcggccgatcacgcaccgacggacgactcgacttcatacaggccggcgatgtcacacaggtccgcctcatgggcatcctcgaccaccacggcgtcccgtctggccacggcgcggatgatgtcgcggcacgcgcattcgccgtcggcatccacatgccgcgacaggcagccccggccgaccaccggcagctcaaggacatgcgtcgcctcccggatcaggcgcgacaccaccgcgccggtcgaccgctcgtcgaatacgccatcctcgtcacccgtgccatacacgcacagacggtcgtcgtcgaagaaccgctcctcgaactcgtccagaccgaccgcattgaccacggccgcgacgcccatgccatcaccccacgaatcaaggcgcatcatgtcttcgagatactgggcgaccggcgtcgcctccagtcccaccggaagactcaccaggaacacacgggcctgacctcgcagagaggcgagcgtcccgcccgcgtcgtgcttgaccgagcagctcagacaacaatccgacagatcgaagatttccgcgtcgcccaccccgacgccctgccccaccgggcggctgacacgcctgacgatgctcagaccggcatccgcctcgtcattcgggcgcacatcgtacgagatcgcgcatacggacgcatacgagtcggccagggagaacgccacggagtccagactcagccgatcggcgcccgtcagcagcaccaccgccgtatccgcgtttccccgtgattgcaatgtcggatgactcatgatcgcctttctttttgataatgattatcattatgatatattggcatccatgtccaaacaatgtcaaattctgggcacgcgcgcctcaacgggcaaccgtgtatcccactcgcacaggaaaacacgccgacgcttcaacccgaacctgcagaccaagcggtactgggttccctcgctcggccgtcacgtcacgctgaccgtcagtgtcaaaggaatgaagaccatcgaccgcatcggcatcgaagcggccctggcacgcatccgccgcaacacgccggaccgtctggaactgacgaagctcgacccggtcgtacgcaagcgggtcacattccacgagacccgctgaatccgttccgacggcccgcacgaaccgcggccgcccgagcgtcatctcggcacacagccatcatcaaggagcctcaatggcaaagaccagcaaaatcaacaagcaactgcaacgcgagcagatcgtcgccaaatacgcgcagcgacgggcacagtgcaaaagggactcggtcaacccgcacctgaccgccgacgaacgcgccgaggcgatgcgccgactgcatgcgatcccccgcgacgccagcccgaccaggctgcgcaaccgcgacagcatcgacggccgaccgcgcgccttcaaccgtaaattcggactgtcccgtatcaacctgagggaaaaggcgcaccgcggggagcttcccggcgtggtgaagagcagctggtgatccagcgcggcgcaccaacatcgcatcatcagaaaggcatcatcatatgaaagacaacatccatcctcaatacgggtacgtggtattccgcgaccggtccaccggaaaggcgttcctcacgcggtccacgctggtcgcgaaggccgcgagcctgccgaccatcgaatgggaggacggcaacacctattccctggtcaacgtggaggtgtcgagctacagccacccgttctacaccggccgcaacgtcgtgctcgacacggccggccaagtgcagaaattcaacaagcgctacggacggagctgacagggccggcgaatgccggcatcccaatgcgcgaaccatccccacccgctacgcggaagcccccgctggcgggagctggctcgcgaagcgagactgaggatggtcggccgaccggcgcagcccatacatcaacactgcataaacccaccaacactgcataaacccatcgaaaacacgaaacggagcaacgatatgaaggtcaaatcgtcgatacgctcgttggcgcgcaaggacggctcgtacgtcgtgcgccgccgcgggcatctttatgtaatcaacaagaagaacccccactggaaagcgaggcaaggctgatggcactgccgaaagtcagaacgtcgcgcgcgaacacgcatgcgcgcaggtcacaatggaaggcgcaggccgcgcagctgatcgccgtgcacatgcccgatggcgaggtggtgcacgtgccacacagtctggtcaaggccgcgcgcaagggatacgtgaagccgcggtagacccgcgacccgatgcgtgatgggtcaatccacgcgaaccagccgccaagaccagtgacatggcctcagcaaggacttgtatgcagggtgccgcttctcaagacgagaggcggcacctttttgcattgggaaccattatcaccgtggtacgatatggcggcatcatcccataccgacagcccatgccggcaattcaaggagcgtcataatgtcatggggacatcacaccggcacggttcatgacggcaccggacggggacaccacgccgatggcggcagtcccattgacgccaacagcgccgatgggcgcgaccattcggcgcattacctttttctcatcatcggcacgccgctggtggcgtttctcatcgccgcgtccgccatgttcgaatcgcgcggtctgccgattccgctggtgcgcatcggcaccggcgccgccgggctcatattgcagacgatcccgttcatgctggtgggcgcgatgatgtcggcagcggtcagcacattcgtcagcgccgatgcgttggagcggcacgtgccgaaatcgctggccggcggactggcgatggcgatgatcggcgggctgtgcctgccggtatgcgattgcatggtggttcccacgttcgcgaatctggtgcgcaagcggctgccgctgccgtacgcgacggcgctgctgtgtgcggccccggtgatgaacccgatggcgatctggtccacgtggttcgcgttcacgggcagtccatggatggtggcggcccgcgtgggtctgggcatgctggtggcgagcgccgtgggattgtcgttcgccgtccgcccgtcccgctcccccgccgtacgggaccttccgctgacgaggggccggacgccggcctgtgatggctgcgccgtacaacatgcggggcaggatgggcgttcccgcttcgtgcacttcctcaggcacacgcacgacgatgtcatgcgcatgatgccgattctgctgtccggcacgattgcggcatccatcgtacgcaccgcgctgtccccactgaccgacggctccggcacgatcgacggcatcggtgccgcgacgctgattgcggcggcgatggcgatagccttcctctgctcgctgtgctccacgtccgatgcggtgatcgtcgcgagtatgaccggcgtgttgccggcttccgccatgctcgcttttctgcttttcgggccgatgctggatctcaagaacacgttgatgctggtcacggaatgccgtccgcggttcatcatccgctttgtcgtgaccgtcgcggcggcctgtttcccggtcgccgtcgccatccatctgacgacgggagcgtgatgcaatgacgaatactctgaactttcccggctccgaccggcatgccccggcggcacggcatgctcccgcgcttcccgaccgtatcgaggcgatctgtttcgcggcactgggcgcggccatcgtgtattcgactacgagcggctcgtatatcacgctcaccacgccccgatcgctgccgtatctgatcgtcggcgcgatactgctgttcgccctgtccgtcgccgcgtggctcggcgtgttccatgccgacgagcgatcctcgtttcgtttcctggtcgcgctcgtcatccccgcgctgctcatcgccgtgccgttccaacccggcaacggcaccggtttcgacacgtacgccgcaggacgggccatcgccatacgccgggacgcgcacaagccggcgggattcgctcatctccacgggctcgacgaggagcgcaagaccatcaccatcagcaacgacgaattcggttcgtggttctcccacatcgaccacaatccgcagcgatacatcggctatcgggtgcgtctcaccggtttcgtctacaagccgtccacgctcggcgcccatgagttcgagctgtcacggcaattcatgtcctgttgcatcctcgatatgacgccgttcggattcaccacgcactatgcgaagaccgcgcaccttcaggagcatgactgggtgagcgtcgacgcgacgctcgtacaaggcacgtacggcatcgccgggcatacgcggcaggggccgatgctgaagatcacgtcgctgcacaccgccaaagccgcgcccaccggctatttctactggcagtgaccgtgctttcggcggcaatccccgccgccgaaagcacggtcggcttttgctgcggccgctgcgtcaccggtgactgctacgacgactccgactgcgagcacggctccaccgaggagtgcgagggcaaggcctgcgtgcacacctgccacgagaaccgcgaaagtcacgagtgcgccttctgccacctcgccttcgacaccagcgagaagtgccacgaggaaatcctcgccgacctcaaggaactcaaggccgaactggccgcatgatataggcgaatggcggcatggaggaaccgagtggcatcccttcgcgccgccattcgtcgttatcggctcctccgcgcgcgagtgccacgccgccggaccaccccagtcagcccgcggccgacagccctccgccagcaggggcgaatccgcggaaaggtcagcgttttccctgacaatcggggcataggccgaacacctcaagggtatgcgactccaccgtgaacccatgcccgtcggccaccttgcgcagccaggattcgctcggcggatcgatctcgatcgtcttgccgcatttgcgacacaccagatgatgatggtgggcatcatcgccgcacaggcggaacagctgctgcccatccatgcgcacggtatccgccgctccggaatccaccagcgagttcaactgccgatacactgtggcgaggccgatgcgcagtccggaatccaccaacttgcgatgcagctcctgcgcggaaatgaaatcatcacagccgcgaagctgcgccatcacggcatccttctgcttcgtatgcctcaccggcccgttcgccatcacacgctcctcaagtattatcatttaacaaccattaatgataatagcgcaatccacggcgacatgcgagcgccgcacatacaacgaaacgaggggcggacgccgcagcgtcacgcccctcgctctcgaaccgccaaaactaccggagactacttgaggtcatcccagcagccggtggcctccaacgcctcgacggtcgccgcagtgtcatccgtgagcacggtgatatgacccatcttgcggttatgacgcacctgcgccttgccgtaatcgtgcacgttccactcgggatggtcggcaatcagctccctcgtgggcgcgacatgctggccgagcacgttcaccatgaccgccgggctgagcagcttcggctggatcagcggccagccggcgatgccgcggatgtgcgcgtcgaactgatcgatcgagcacgcctcgatggtgtaatgccccgaattgtgcgggcgcggtgccagctcgttgacgacgacgcgaccgtccttggtgatgaacagctcgatggcgagcgtgccagccagctcgaagccgcgggccagggccagcgccatctcgtgagcggtgcgcgcgatctccgggctcacctcggcgggggcgatcgtcatatgcaggatgttgttgcggtggtcgttgcgcacgatcgggaacgtgacgtaatccttgccgttgccggacacgagaatcgacgcctcgaacgcgaaatcgacgaacccctccaggatggacggtgggaagccgccgccgcggtcgccacgggcgcgaatcttctccaggtcgctgtcattgcgcagcacatgctggccgtgcccgtcgtatccgccggagcgggtcttgagcacgcacgggtaatgcaggtcgtcgatagcggcgtcaagctcctcgaaggtgttgacctcacgccagggtgcggtctcgatgccgtgcctgttgatgaaggtcttctcgtggatgcggtcctgggtaacgcgcagcaggtcggtgccctgcggggccgcgaccaggtgacgcacctcgtcgatggattcggcgtcgacgttctcgaactcataggtgagcacgtcggacttctccgccagatcatggatggcggtcttgtcgtcgtactcaccgacgacctggaaatcggccacctgcgcggtcggacagtccggcgtcgggtcgagtacgccgatgcggaagcccatgtacttcgcgctcaatgccatcatgcggccgagctgtccgccgccgatgatgccgatggtcgctccgggctgcagcatcttcaccgcgccatgggtctcctcagacaagctgggcattggattcggccaccttctccttgagagcgtcacggtattcctgcagcgcgtcggcgagacgcttgtcggtcgtgctcaggatctgcaccgccagcaggccggcgttcgtcgcgccggaattgccgacggcggtggtcgccaccggaatgccgccgggcatctgcacgatggacagcagcgaatcccagccggagagcgcatgcgagcgcaccgggacgccgatcaccggcagcgtggtctgggcggcgaccatgccgggaaggtgcgcggcgccgccggcaccggcgatgatgaccttgagaccgttgacacgggcgccgtgagcgaattcggccatcagttcgggcgtgcgatgggcggagatcacctgcttgacgtagggcacctcgaactggtcgagcatgtcgcaggcgtgcttcatcgtctcccagtcgctggccgatcccatgatcacggcgacttcgggcttgctgtctgtcataagaagaacctcctcttggataccgttacaactgtacaatcccctatatcctcaccacgaccttgccgaacacgtcgccggaaagagccttggcaaaggccgcgcgggcgtcggcgagcccgaacgtcgagtcgatcaccgggtgtatgtcggcatgttccacgaagcgcagcaggcgggcgaaatcctcgcgcgagcccatcgtgttgccctgcacgcgtatgtcctggaagaacacgcgggtgagttcggcgcccggctggtcgccggtggtggcaccgcagatcgcaatcgtgccaccggggcgcacggaacgcaccgaatgcccccatgtggcggcgcccaccgactcgatgacggcgtcgaccttgcgcgggaggcgcgctccggcctcgaacgcggcgtccgcgccgagggccagtgcacgctcgcgcttggtctcgtcgcgcgaggtgacgaacacctccagcccggcggcgtgggcgagctgaacggcagcggtcgacacgccgccgcctgctccctgaatcagaatcgtgtcgcccggtttgacgcccgccgaagcgaacaccagcgagtaggcggtcagccagctggtgccgagcgcggcggcctcgtcgagcgtcaggttcgcgggcttggcgaacacgttggcgctgggcacctgggtcttcgcggccatcgtgccggggtaccgctcggagaggatcgtgcgccgctcccccggcatcacgccggccccatcggcgccgatcacggtgtacagcacgacctcgtcaccggccttgagccccttgcgcacgggaatgtcctcatcgagcacgccggcggcgtcggtaccgaggatcatcggcgtggcctccgctgcgagccccacgcccttgaggctccagatgtcatgatggttgacggtcgcggccttgacggacacggtggaccagaacgggcgaggctgcggctcgggcagctcccccacctccagcgcggccaaggggtcggcattgttgatcgttgcggcaaatacggccttcattggcccctccttgttcggggatatccatcgtcgataccattcaaccacgcgcacacgcccgcgcggaggccgggcgcggcatgcgcaacgggagcgggacgcgacagacggtacaggcggaacggagccgcaatgcctcccaggactcctgccgtatacggagatgttgggggcattttctcgtgccggcggcccgatgcgacggcatcgattatcatgtcgcttttgaaacatccgaggaaaggacatatgcgtatgagcgtcggcatattgagtgcgattcacggaccagccgacgtgcatgccctcgacgccgcggagcttccggcgctgtgcggtgagatccgcacgacgctggtgaggtacggccatgtccacggcgggcacatcggatcgaacctcggcatggtcgaggccactgtcgccctgcaccgcgtattcgactcgcctcgcgaccgcatcgtattcgacgtgtcgcatcaaagctacgtgcataagatgctgacaggccgcgccgccgcgtatctcgacccggcgcatcatgactcggtgacgggtttcaccaatcccgccgaatccgcccatgaccagttcgtgctcgggcacaccggcacgtcgatttccctggcgtgcggcctggcgaagagccgtgacctgacgggcggcatggacggcggcagcggcatacgcaatgtgatcgccgtgatcggcgatggctcgctcagttccgccatcgcgttcgaggggctgaacaacgccgccgaacagggcggcaacctcatcatcatcgtgaacgacaacgagatgtcgatcgcggaggatcacggcggcatgtatggcacgctcgcccgtctgcgcgctaccggcggcaagggtgggccgaacctgttcatggcgttcggactggactaccggtatgtcgaggccggcaatgacgtgttcgctctgatcgaggcgttcgaacaggtcaaggacaccgatcatccggtcgtcgtgcacatccacacgcgcaagggtctgggattgccgcccgccaaggaatccgcggaagcccgcgactccgggattcccgtggagggtgacgccgcggtcgccgccgaggactcgatggtcttcgaaggacgacatgaggcgaaccattggcaggatcccgacagcacgaccgggcggcccttgggagcgcgcaagcattacgggagcatggcgatggcggcattggaaccgcggttcgccacggaacctggactggtggtcatctcccccgcgacgccgggctcgaacggcatcacccgcgcgttccgggaacgggccggacggcactacgtcgataccggcatcgccgaagagcacgccgtggcgttcgcctcgggcatcgcacgggccggcggacgaccggtgctggccacttccgcgacgttcttccagcgcacgttcgaccagttgcagcaggagctgtcgctgaacggcaccccagtgacgctgctcgacttcggcggcggactgtccggagccgacaacacgcattcgggcgcattcgacatcgccatgttcggcaacatccccgggctgacctgcctggcaccgaccagcggccgcgcgttcctcgacatgctcgcctggtcgacgagccagagcaacacctctccggtcgtcatccgggtgccgggcgacacgattctcaaccgggagcgctcgggcgacttgcccggcgacgcgcaggacgtcacggacatgggctccgcggacgatacgtgcagtaatgcgtgcagcgaaaagaccacggccgacggaacagccacctgcccgtggtcccgttaccgcacgattcgccgcggcacgactgtggcggtcctggcattgggcaacacgctgccgttgggatggcgcgtggtcgaggctctggcttcggatgtccggcatccccttgatgccacactgatcgatccgcagcagttctccacgctggatgccgcgacgctgaccgagctgaccgggcgccaccgcatcgtcgtgacgctggaggatggacagctcgaaggcggctggggagacaaggtcaccgccttctacgccaatgccgggctgcgcgacatgcgcgtgctgaatttcggcgcggcgaaggagttcaccgatcgcgtgccgctcgacgcgctcaacgagcgttatggcatgaccgtcggcaacatcaccgcgcgcatccgcagcgagagccgaggctgaaagccgcgcttatcaggccccgtcaggcccacaaggacgtcgaaaaggaacagaaagcccgttggaaccttattggttccaacgggcttcaccgtgaccccggacgggctcgaaccgtcgaccttgagattagaagtcacatgctctatccagctgagctacggggccgaacaacgaaagaacagtgtaccatcaccgcggcacgttcagggatatgtgtccgcgggcggcgcggcaagtcatatccgccgccccctcaccagtggccgggaaccactgcgccgcagtcggggcagcatccgtcgggtccgatgcggtcggacagtatcgcgtaccagtcgcgcacgatcaggctcgccccgcacgccgggcagaatgtggtgtccgctccagcagcgcgtaggcgagggcggcgaccgaaccggagtacacgtatccggcatgcggcacaatcaccgccttcggagccccctgcggcagacgcggcgcgagggacgacaccagtctgcgcgcatggttcatctgccggtcaatcatggcctgcagttcgccggcgttggccggatagaacgcgccggctacggcggccgggcggacggtgccggcctccttgccggaatcggaaacaaccatcatcatgacgcctcctcacatctatctccatcgtagcctcgcgcggcgtcaacggctacggggacgtggccggccctgcacgactccccgcacgagccgcggacggaaccggcatctcctgttgcgtcgctaagtgcgcgccgaaacgacgagtacgcgaacataggaacgcaaatgatcctgtttgcgtatcaaagtgcgcacggtcgtcgtttcggcgcgcacttagggacgcaaaccggccgacaacgtcgcgcaggccgcgcgcgaacaccacatggcggccaagcctccacccccgcaaggccctaatgcggccaaatacgccgaactgcgctgattttcgatgatgattcagcgtgtctcctcgcaacgttactatcagactatggggaatgacacaggacgaatgccggccgcggcgaacgacggctcgggcggcagtacggccggcggcagcccggacgccgccccctatgccacaccctctttcgcgcacggcatcgttccgttcgaccatgagatctcatcgaaccagcatctgacgttctcatacgccgagcaatcattcgcctcagcgaacatcccgtgggatccggatcatgacgcgctgcatctcaaggagcgcggcatgttcaccaacaccgcgctgatcatctccgaccaatgcccgttcaccatcaaatgcgcgacgttcgacggcgacgtcaaggcacccatcagcgagcgcatcgaactgagcggctccatgatcagacagctcaatgacgccatgacgttcctgaacgggcacaacagacgcgacgacggccgccaatgcccaccggacgcgctgcgcgaggcgctggtcaacgccgtgctgcatcgcgactacgcattccccggcccgactctggtcaacatcttcccaagccgcgtcgagatcgtgtcactgggtgggctgatggacggcatcgagatcaacgacctgctcaacggcatcagccagccgaggaacccccggctggccgaactgttcaccagactgggattcagcgagaattacggcaccgggatccgccgcatcatggaggaatacgacgaggcctccgacaacccgcagatccgcgtgggcacgtcctcggtggtgatggtgctgccgttgccgtcgcagccgtcgccgggtggatcgcgcacgcgcggcgacgccacaaagggcggctccgcacaaggcgccgacgggcacgacgccgcccaaggccacgcgaagatgtacgcattccccaccatcatgacgacggccaccagcgacccgaccgtggctctggccggcacacgcgtcatcgggtgcgtccccgtgcgcctgtcggacgggtcggcgctgcgcacgtcgccgctcatcgcgccgggacgcatcgcatcccccgcggcaaccgcccaactgccgccgaacgccggacagacgctcgaagaagtgaccctgcactgcatcgcacaggccggcgtgccgttgagccgccagcagatagccgacaatctcggcgcgaccaagaaccagatgacgtacgtgctgcatcatctggtcgagcagggactggtcctcaaacgcggcagatcccgggccacgcgctacagcatgccctgacgcgggcgccggcggagactcccccaccgaaaattcaatttccgttcatctgcgctccaaccgcaggcagtcatcccctcaactcggcacagtagtctcaagactggttccgaaacaaggagatagtaccgtgcaatcctcggtgggcgttcgcgaacgcatcgatcatgtgtatccttccctgcgcccggcggaacaggcggtcgcacgatacgtgcgttcccaccttgacgaggccgcggggctgacggtcggccagctcgcagaagtctcccgggtcagtcagcccaccgtcatccgtttcgcccgcaaactgggcttcggcggataccgtgagctgcgatacgtgctgcgccacccgcaggaggaacgctcggtgaccttcgacccgctcgaaggcttcgacctcaatccgtgggacaatcccgacgatgtgccgggcaaggccatgacccgggcgaagacgctcatcgacgagctgcattcggccatggacggcaaggcgctgcacaaggcgacgacgctgctggcgcaatcgaggatgatcgacatctacggcgtggagaactccatgtctccggcgctcgacctgtgcaccaaactcacttatctgggactgcaatgccggttcaacgccgacgcctacctgcagcagatcggcgcggggcatctgacgaaggacgacacggccatcgcgttctctcactccggcagctccgccgacaccgtgaaagcgctgaaactcgccaaatccgccggcgcgcacaccatcgctgtcaccaacaacaccggcaccccgctggccaactgggccgacgtgacgctgctcaccggtcgcggcgacatggcgatttacggcaacgccatcttctcgcgcgtggcgcacagcatcaccgtcgacatgctgtacatgagcgtgatcctcagcgattacggccgattctccaccgagctcgaccgttccggccgcatcatcgccgaccgcgagttccgcggctgaccgccatcatccgcatatccgcaaggttccataagactgcacaatacacgcgaggttccatgaaggctcgcgttccgtgacgctcagcccattccacccccgcaaactacagaactacgtgcatcagccgtaatcgaactcgttgttcactctcctttcccccaactttccaccagatcggaatccggccgccccgcgggagccgatgatggaatcacggcgagaagttcgtccgtgacacaactgaacaccggacgggatgccataggcatcacacgcaatggcgccgcatcaggcggcgcgacggaaggcaagcgacgaaatatgctcgactcagccgacggtgttaccgtagacctgcgcttgcaggtccttgcgagaggtctccaatttggtgatttcgccgagcagttccagtttttccgagccttcgggcatgccggccatgcgccggcgcgccgcagcgatgcgccgcatgtatcccatgtccagaagacgggccaacagttcggcggcgtaccgggtctcggcggggctcgccggacgcagctgcacggccgccgcattggcagcgcccggcacgccggatccggcgacggcccgatcctgatctgacggaggcaggggcagctgcagcaccgcgagctcattgatcaccgtcgtcagcgtcaatccgccggccttgttgagattatgcatccacaacccctgcggcgcatcatccggcggcaatccgcccgcggcctgaatggcgaggaacaacgcgcggaacaccggggcgacgaacgagtcctcgttgagcgacgcgaacatcgtgcggttgatggcacgcggaatctgaatcagcgtggccatgaactgctgctcgcagatgaacaccgcatcgtcgatgcggaaatacgactgctctgtggcggctcgatgctccaacgcccggcgttcggccggattcgcatacggattcgagccgggctcgacacgaggctggcctgcgccctcgccgttgcccgcgccgaaacgacgccggggcgaataggcgtcctcgtcgcgcacatgcagctggccgtgcgccgaacgcacctcgcgctgcatgatgtccagatccaccccgatgcggcgcgtcgccttgcgcgcatacaggtcacgctgcgaacgatcgcgaatctgggcgatgagcggcgccacagccttcaccgcgcccatctgcccggtggcatacgtggtgtcgaaccggccaatcgcggcatcgatcacaaaatcatacaacggcttcgcatgctcgatcagcgagcgcaccgcctgatcgccacggttgatgcgcagatcgcacgggtcgagattgtcgtcggcaacggcgacgaacgtctgcgacaggaacgccgaatccaatccgaacgcgtgcagcgcggccttctgccccgcggcatcgccatcgaacgtgaacacgatgcgcgagctcaatgcctgcccgggaacgttcagcgggccgaccagctgcaccgcgcccagcgaatcatcggcgaccagccgccgcacgatcttcgcgtgctcggcgccgaacgccgtgccgcaggtcgccaccgccgtatcgatgccggccagatgcatcgccatgacatcggtgtaaccttcgacgatgacgacctgacgcttcttcacgatggacgacttcgccaagtcgatgccgtacagcacctgcgtcttacggtacagctgggtgtccggcgtgttgatgtacttcgcggcgatctgatcgtcgtcatacagcttgcgcgcgccaaagccgagcgtgcgcccggtcgaatcacgaatcggccatgtggcgcggccgcggaaatagtcgtacacgccgcgctgcccctgcctcgcaagcccggcgtcaagcatctcctgctgcgtgaaccccttggacgcaagatagcgaaccagattgtcccacccctgaggcgcgtacccgcagccgaaacgctcgcagtccgcccggctgaaattgcgtccgccgagcagcttgcgcgcggccagagcctccttgctcatgatctgcgacatgaaaaaacgctgagcctcctcgttggcctcgatcagcctggcccgcttcgacccggaatgctcggtgcgcccaccggaattctcgtaatgcagctcgatatggtatttatcggcgagaagctccaccgcctcgcggaaatcgatgttctcctgatgctcaacgtagccgaacacgtcgccgccgagaccgcagccgaaacaatgccacacgcccagcgcaggccgcacggagaaactcggcgtcttctcgtcatggaacgggcacaggccgacgaacgtgccggtgccggaaggccgcagcgtcacgctcgcggacacgatgtcgtacaggtccgcggcggcgcgcaccttctccacgtcttccttcagaatcattccagccatagcccaccagtctaacgtcagccgtgcctgaggccgccgcggccgtcacaggatcgaatgcaacgcaagggcggagctgtcggtgagggaggccacctggtcgaccgcgacgcgcaggcgctcgccgtcgttcgtcgcctcgtcccaatcctgcaggagcacggcctccagcgcactggaagggcgcggagaatcggccatgagcacgtcgatgagatcgttgatgatctggcgttcctcctggtggaacggctcgtgctcgcgaggagccatcacgaagtacacggcgatgcccttgagcgccacgatttcgtagctggtctcctcggggatcaccacgttcgccgaataccgggtcagaggtccgtcgccgtacgtgtcgcgggtcgcgttctccaccgaccatgcgaagcgtccgatcaggtccgaggtgatgttcttcagttgcgccagcgcctggcgcgacccgtcgaagtggtcggggaacatgcgcagccgccgcagccttccgaacgcccgctccagctcgtcggcatcccatttcgagccgtaccatgagcgcgtcgcctcgatgatgcggccgatcattcgcgggtcggcgagcaccagtgggttgaacgcgccggtcgctatggcgtcctcgacgtcgtggacgctgtatgcgatgtcgtcggacaggtccatgacctggcattccatgggtttgcgggcttcgggagcgcctgtcttcagccagcggaacacgtcctcgtcatccgggtacacgcagaacttcacgccgcggccaccgtcgtacttggccgcttcggcgagggtccacgggtatttgacggccgcgtccagcgaagccctggtcagattcacgccggccaaccggccgtcggagtggaagaccttcggctccagccgggtgagcaggcgcagcgtctgcgcgttgccttcgaatccgccgatgccggcggcgatgtcggcgagcgcccgttcgccgttatggccgaaaggcgggtggccaagatcatggcacaggcacgcgcaatcgaccacatccgggtcgcatccgagcatggctccgacctgccgtccgatctgggcgacctcaagcgtgtgggtgagcctggtgcgggcgaaatcgtcggtgcccgcgacgaggatctgcgtcttcgcgccgagcctgcgcagcgccgacgagtgcacgacacgggcgcggtcgcgctcgaaggcagtgcgcgatttcgacttcggcggctcgcccgcccagcgctgctcgtcgaatgcggtgtacccctcccctgctggtatgcgttcgccgctgtcctcggatttcatgggacctcccttgccgtcgccacgttccggtatccagtttagcaaagggttccttggacggagccggtcacgccgtcctcgcaatgcgtgcaatgtgcgcgacgcgcggcgggtctacagcaggctcgccggatcgagcttggcgaggtccgcggcaggcagcacgtcggcagcatgcaggtagagcctcgggatgcgattgcgcagacaggtgaacacctcgtagctaatcgtgtcggcggcgcgcgcccagtcgtcggcggtcggctcgccgtattgctcaccgcgaccgggcccgaacaactccacggtgtcgccctcatggacgccaagctcggcggcagacccgtgcaggtcgacgatgaactggtccatgcacacgcgaccgcacacgtgcagcaggcgcgggccggcgctggtcatcacacgcacgggaccgccggccttctcgacatgcttggcgccctgcatgtcgaagccggacgcggaacggtggatgccgtcggcgtagccgaggggcacgatggcggtgctggtgttgtcgggcgtcaggtacgtgcgaccgtatgagacgccgtgcccggcctccacgtccttgaccgtaccgagctgcgcctgcaatgtcatggcgggcttcagatgccagtcgcgcggcgtgcccatcgccgggtcgggctcgtagccgtacaggccgatgcccggacgggtcagttcgaaatgaatctcgggacggttgagcgtggccgcggtgtttgccagatggcgtatttcgggcgcgatgcccgcggcttccatgcgacgggtgaattccgtgaacgattcgatctgccggtcggtggaggcgacgaattcaggcacatccggcgagtcggcgaccgccagatggctccactggccgacgatgtgcagcacgccctcatgcgcgagcggcaccagcttggcaagggccgcgtcgaatccggccggcgtgaagccgttgcggccgaagccggagtcgaccttgacatgcacgcgtgcgggtttgccgagccggcgcgcggcgtcggcgagcgcgtcgatgcccgccagcgagccgacggagatgtcgatgtcgttgtcgatcagctcgtcgaacggcacatccatgccgttgtacacccatgtcagaatgcggcagcggtccgggccgatgccgagtttgcgcagcagcagcgcctcatgcgattgcgcggtgcccagccaggtcgcgccgcccgcgagcgccgccagcgcggccggcagcagaccgtgcccgtaggcgtccgccttgaccacgcccatcaccgccgtgccggaatgcgggccgcccaccacatcgaccaagtgggccatgttgtccctcaacgtggccaggtcgacgatcgcctgcgcggggtaccggcgtcgcgccgcccggtagttggcctcgccagccggggatgaaaactgcaattcggatgctgcgttcaaagtcatggctcttattgtggcgcggcatgatgacgaatgccggagcgcgtcgcatgacggcacgaatccgacctcagccggcagcggcgttgtccggcgcattgccgtatgctatacgacgcatattcgcggcgtccgcggtcgaccgccgccgcatcagattcccggcgttgaggcgtgccggggtcccggaacgccgtccggtacagcccaatccattccatacattgagagaagaccatggatctatttcgcaagaaatcggtggatcagcttgtcgccgaatccaccccgctcaaacgcacgatgcacacgttcgacctgacgatgctgggcatcggagcgatcatcggcaccggcatcttcgtactcaccggcaagggcgcgctgaccgccggcccggcgttgatggtgtcgttcctgctggccgcggtctgctgcggcttcgccggcctgtgctatgccgaattcgcgtcgatggcaccggtttccggctcggcatactcgtacgcctatctcgcgttcggggaactgatcgcgttcgtgatcggctgggacctgattctggagtacgcgctgcaggcggccacggtgtccgccggatggagcggctatttcaacaagctgctcgaagggttcggactgcatctgccggtcgagctgaccgccgcgtacggcaccaaccccaatacgaccacatacttcaatcttcccggtttcgtgatcgtgctgctcatcacctgggtgctgtcgatcggcatcaaccagacgaagaaggccaacgacatcatggtgctcatcaagctcgcgatcatcgtgttgttcatcgtgtgcgtcatctggtatgtcaacccgtccaactggaagccgttcgcgccgtacggcatctaccagttccagcccggttcgacgcagccgtatggcatcgtgccggccgcgtcgatcgtgttcttcagcttcatcggcttcgacgcggtgtcgtcgtcggccgaggagaccgtcaacccgaacaggacgctgccgcgtggcatcctgtattcgctggtcatctccacgatcctgtacatcgtgatgacgctcatcatgaccggcgtggtgccgtatgagcagttcgcgcagttcatcgacgcgccggtggccggcgtgatcctgaagaccggcatgaactggctggcggtgatcgtcaacctcggcgcgctgatcggcatgaccacggtgatgctggtgcagctgtacggccagtcgcgcatctgctacgcgatgagccgtgacggcctgttcccgaagttcttcggcgacgtgcatgacaagtaccgcaccccgttcaaggggacgtggttcttcggactgttgaccgcgttcgcgggcggcttcatcaacatcaacgtgctgttcgagctggtgaacatcggtacgctgtccgcgttcatcattgtgtcggccggcgtgatgtggatgcgcaggacccagccggacgcgcatcgcgggttccgcgctccgggcgtgccgttcacaccgattctggcaatcgcattctgcatggtgctgatcgccggtctcaattgggagacctgggtgcggttcgcggtctggttcggcctgggactgatcgtctacttcgcctacagccgcaagcgctccaagctgaacgcatccgacgcggaataacgtgctcccgctggcaggggctgtcgcgaagcaactgggggtggtcttcacggccagtagtgcatcagaccaccctcggtctcgctgcgcgcgacagctcccgccagcgggagcacgttcggcgactgaggagcaacgcaggcgacgcgccgttgtttcgtgccgggcgttaccactcgtgacgctggtatgcgatccttgtcgtatcggtgggccggtcaagcagctgtatcaggccgcagcgggcgaatccgctggtttcgaggacgtgctgcatggccttgttgttggggtgggtgtcggcgcggacgttgccgtaatgcttgagggcccaggcgatgcagtcgcgggcggcatgcttgacgaggccggaggacgcgatgcggtggatggtgacgtaggaatcgtcgtcgagccaggcgccgtcgatgtgatggtaggtggggtcttcgccggggcatagcgcgaattgcgcgaggatgcgctcgtgtccgcccacttcgtcgacgagcagcatggcgcgtcgctgcgcgatgtcgtcgcgtacgacgtcgtctttggggaaggtgtcgccccattgggtggggttgccgttgcgtgccatcagctcgcgggcgcgcgcgtagttcttctgcatgtgcgggtagtcgcgcatggtcgcgtgtcggaatcgccgctgggaagcactgtcagtcaccggtcacctcatgttcgtgtgttggacaactggccgtaaggctatcatgggcactcgtccgattggagtgcatgtgccgtttatcggaagtcgttatgatgagggcggcaccggtccgataccgatgccgccctcatcccataacccggaccaatgccgggaatacggctgtgtcggccagtcccagtctcagacgaccttgcgctcgaacgggtcggagctgatgcccttggcgaggatgtccttgcaccactccttggcggtgaacaggctgtggtcacggtagttgccgcagctttcgatggtcgtggcgggaacgtcgtcccacgtggccttatatgcgatgaattccagcgattccttgagggcgcgggccacatcctcggtggagtgcgtgccccaggtcagcaggtggaagccggtgcggcagccgaacggagagcagtcgacgtagccggggatgcgttcgcgcagcagcacggcgatggtgtgctcgatggtgtgcaggcctgcggtcggaatcgcgttctcgttgggctgtaccagacgcaggtcatagttggagatcacgtcgccgttggggccggtctctgtgtcgatgtaacgcacgtacggcgccttgaccttcgtgtgatccagctggaaactttcgacaatcggcttttcttctgccatcgcagactccttttgctcgatatgacgccggcgcgtacgaccgttagccggcattccatcgaccattgtctcactatcgcgcgcgtctcgccgcattcttggctataggcgttcctcatatacggcatatacggcacgaggcgagtccggtgcgctgtaacggcgctgtcaatcgtcgaagccggcgatggcctccatgaatcgcttgccgtatttggccagcttgctgtcacccacgccgttgacggcgaggaactgcgcgtcggtgatggggcggagacgggccatgtcgcgcagcgtgcgatcgttgaacaccatgtatgggggtaggctgttctcgcgggcgatggacagacgcagttcgcgcagtttctggaacaacgtctcgttctcgtcgtcgggggcgtacgagcccaatgccgggccgtccgacgccgcggatttcgaactggaatcggtccgtgacgtcacgcccgttccggcgccggcggccttgcgctcgacccgtttgatctcatatcggaattcgggcgcgaccgtttccgccgcgcgctgcccgaagccgacgatcggcagccgcccttcggcgatggagaggaatccgtcggtggccatctggctgagcacgtcgcggattcgggcttcgggcgcatcgtgcagacgaccgtagctcgggcacctgtcaagatgccgcgcgatgaggtcctttgccttggagccgcgcagtatcgccacgattttccccgagccgaggccttggcgcacggggccgcacgtcggtcgcccctgatcgtcgtaatcgtacatggcatcgtgcacgcatcggctgattgaccgcgcgatgtcggtcacgtcaagggtttcgaacgtgctgtcgcaattcgtgcaaccgcccgtgcatgtgccggttcttggcgtgctctcgccgaagtagcgggtcatgtagacgtgcaggcagtcggtggtacggcagtagccgatcatgccgtccagcagacggcgcttgctcatgcgcacggtctcgcgctcttccggggtcagccgttcgttgtcgttatccatgtcgagcaggcgccgacgggtgacgatgtcggattcgttccacagcagtgtgcatcggctcggctccccgtctcggccggcgcgaccggcttcctgatagtatgcctcgatgctttccggcatgttgtggtggatgacgtagcggacgttcgacttgtcgatgcccatgccgaacgcattggtggcaacgactaccggcacggcgtcggtgacgaagtcgcgttgcgcctggttgcgtacgtcggccggcattccgccgtggtaggcgaccgcgacggggccatcgcgcatgacggaatctgccgcactgccgcccgccgctccgcgcaacgccggcacggtgtggttgagggccgcggcgagtgcctccgtctccttgcgcgtggcgcagtagacgatgccggattcgtccggatgctcggctacgtatcgtgcgacccatgccgccttgtatttggtctcgatcttgagcacatcgaagtacaggttctcccggtcgaatccggtgacggtgacttgcggggcgttgagccccaggataccgatgatgtcgcggcggacgcgctcggtggcggtggcggtgaacgcggctacggtcggccgggccggcaggccggcgatgaactcgccgatgccgaggtacgacgaacggaaatcctgtccccattgcgacacgcagtgggcttcgtcgacggccaccagcgagatcggcacgcgtgtggcgaagttgcggaaccgttcagtttccagtcgttcgggggccacatacagcagtttgatgtcgccttgcgcggcctgcgccagcaccatggcctgctcgtcgccgccctgggtggtgttgacgtatgcggccgggatgccggcgtcgttgagcgcgtctacctggtcacgcatcagggagatcagcggggagatgacgatggtgacgccgggcagcaacgtggccggaatctggtagcacacggattttccagcgccggtcggcatcacgccgagcacgtcgcgcccggcgaggatcgcgtcgacgagccctgactgccccggtcggaacgagtcatagccgaaataccgtttgagcgcccccagcgccgccgcctgatctgtcatgcctcccaacattaccgcattccggccaccgctccttcgagtacagcgtcgggactgcctctctccccctctctttccttctccgtcgtcccaaaagcgtcgctaagtgcgcgccgaaacgacaagtgcgcgcacttatggacgcaaaccgggccttgcatgcatgcccgtcggcgtgccgccgaatcagatggcggcgaaggcctgctccaggtcggcgatcaggtcgtcggcaccttcgatgccgacggacaggcgcaccagattcgcgggcacctccagcgtggtaccggccactgaggcgtgggtcatcgcgcccgggtgctcgatcaggctctccactccgcccagcgactcggcgagcgtgaagatctgcgtggcgccggcgaaccgcttggccgcctcgaaaccggccgcgagctgcacggaaatcatgccgccgaagccgccgtgcatctgacgggcggcaatctcgtgacccgggtgggattccagtcccgggtaccacacgcgctccacttccggacgggtttccagccattgcgcgatcttcagcgcgttttcgctgtggcgctgcactcgcacggccagggtcttcaggccgcggatgtccagccacgagtcgaacggggatggcaccgcgccggcggcgttctgcaggaacgcgaccgcgtcgcgggtttcttcgtcgttgagcacgatcgcgccgccgaccacatcggaatgcccgccgatgtacttggtggtcgaatacacgaccgcgtcggcaccatcgtcgagcggatgctgcagcaccggggaagcgaacgtgttgtccaccatgaccttggtgccgtgccgatgcgcgacgtcggcggtcgcggcgatgtcggtgatgttgagcagcgggttggagggcgtctccacccagatgtaccggtattgcttggcttcaagcgcggcggcgacggcggcagtgtcggtgatgtcgaccacgtcgagcccgatgccccacggcacgaacaccttggcgagcagacggtaggtgccgccgtacacgtcgttgccgagcaggatgttgtcgcccggcttcagcgtggcccgcagcagcacgtcaatcgcggcaagtccggaagagaagctcagcgcgtatttcgcgccttcgacggcggcgagctgcgcgtcgaagctgtttcgcgtggggttgacggaccggctgtaatcgtaaccgttacgcagtccgcccacaccgtcctgcttgaacgtggaggtcatgtagatcggcgtgacgacggcgccggtggtcgggtcgggctcctgcccggcgtggatggcacgggtagcgagcgtggtgttggcgagggctgcggcgttggtggagatggtgatggtcatgatggttgtttccttatattgcagtttgctgtattgattcgatattgaaatattgaagttcgggttcgcggacgcggttcagaaggggctttggccgggccttacaggtactgttcggcaagtgatggcctggaggtccgctcgacgatgtcgccatagccgttctcgcgcatccagtcgtcgttgaagatcttttccagatagctgcggccggagtccggcagcagcacgacgactacctgattgctgtccagatcgtgctcacgcgcgtatttcagggcgctgacgacggccatgccggacgagccgccgacgagcagtccttcctccgcggccaggcgacgtgtcatctcgaacgcctcgcgatcggtgacctgcacgatatcgtcggtgatgttccggtcgaacgccttcgggtagaagtcctcccccacgccttcgatgtcgtattggtgcacgtcgctcgggtcggagtagatggagccttccggatcggagcccacgaccgtgaccgcgccgtcagaaacctccttgaggtatttgccggtgcctgagatcgtgccgccggtgccgatgccggccacgaaatgcgtgaccttgtggtcggtggcttcccagatctcggggccggtggtgtagtagtggctcaacggtccgttggggttgtcgtactggttcgggcggaatcctccgggaatcgtgttggcaaggcgctcggcgacctgatagtaggagcgcgggtcgtcggggcccgcatcggtgggggtgacgacgacttcggcgccgtatgcgcgcagcacggcacgcttggattcggagactttgtctggcagcgtgaagatcgtacggtagccgcgctgctgtgcgacgagcgcgagcccgacgccggtgttgccggaggtcggttcgactatcacaccgccgggcttgagttgtccggagcgttcggcggcgtcgatgatgcgctccgcgatgcggtccttggaggatccaccgggattgaaatactccactttgacggcgatggtcgccttgatgccgtcagtgacgtgatgaagctttacgagtggcgtgttgccgatgagttcggaaagactgttgtgaatggtcatcgtggatcctgtttccttctgcgtttcgattggtgcgttattcggtttcgtataccgggcagatgggttgaacgcagttgaaacaggtggatggtgatcgtcgatgatggtgttggtctttgccgtcccgttgtatgacctgctacagatattgttgtgccaatcatgcgacatcggggaatcatcaagaatgaaccgtatttcaagtatgcgtcgtcaaccgttcgcccgcaggcgtcggtcagcgacaacaacatgaaagatacgtcatgcctgacatagtatcagcatctcagaaagacacgcgacagcgcatccacaatgtgatatcagatgactgccgtcattgcgctagcccataaattgcatagcggcgtgagtggacccatcgaatgtcatttcgacgaatccactcacgtaccggctagtctttcacctgttcgtacacttgcgcaggtgtcagctctgatggaagctcatcccccgaatctacgttgactcgctcaaataccggctgccatgcatcagaagcgttaccatgttgagaccgcaaaacgttccacgattgttgcgtatcgtcggtcactcggtatacgccggcagtcgcaccggtcacatagtactgagatgactgttctccaggcaaatcggtcggcgtaagaaacaacatgaccacgtcaccggtctgcagcagagtctccgcgctcccctgctccgcggaaccagtctgacgtacaataatgctgccactgttgacggttcccttaagcgtctgcgagaccttcacgtcaagtaacgtgaaatcagtaatatcatcaatatcccgaatcacggaagttctcgatatttctccggtaataatcaggggactatcgtcctcaagttctaccatggattcataaatgcgtacccgcgactgagaagcatccggcttgggaacattagattgtgccgctgtctgaccgcaacccgcgcacgtaaacatcaacactaccaaccccataagggtcgttagccatctaatccttgaaatcttcttcatcgtgtcacctcaatatctactgttaatacctttgatatcatctgacgtgagatatctgacaccattgttgtaagcgtcagatgcactcttgtacatcactgtattgatcgtagaatgccccaatccccaacaatgagaaaactcatgaagccaaagcactctcatgcgggcaaccgggtaagatgacttcatataataggtatttacacgcgaaaccgcgtctttagtatacccggacgctaaaaatgtataggccgattgtccttcccacccattcttgccgaaattctgagaagttgcctgccaaaccatccgcgttccggtcgagaatccaactttcgttgctgaattaatattggagacagcctgcttggccgaagtcaagtaattgcctttcaccgtggccataagcattacaacctggttcttattgagccaatgactcttgctataagaataggcactcgcgactggcaccatgctcatcaaaaataagaatgacaatagcgttgatactaaacttattggccacttcctgcagcgttgcagcttagacatcttcgcacctttctgataagaacggaaagttacagagacaggatttatatccgtgaagtagcaacacagcaacctatgctgttattaatttataatactcgatttataagaagaaagcaaaaacatacacaagaaggacccccgggggttgttgccttgtccgggggtccttgtcgtgtggtgcggcggcgtgctactctcccacaccctgtcgggtgcagtaccatcgccgtgccaggtcttagcttccgggttcggaatgggaccgggcgtctctcctgggccatggccgccgcaaatcttgggttatcggccgggaaacggggtttcccgccggcgtgtggcggttcggggaccggacaatggacgcgatcgttgctgttgactgatcgtgcgcgtgtgaggaccgtgctccctgtgcgccttcgcggggccctgccgggtcctgcgccacacaccctcgcgggcgtgtggatgtgggttgcctctcgaccattagtaccggtcggctccacccctcgcggggcttccacgtccggcctatcgaccacgtgttctgcatggggtcttcagcggctcggggccgcatggaatccttatcttggagaaggcttcccgcttagatgctttcagcggttatcccttccgaacgtagccaaccggccgcgccactggcgtgacgaccggcataccagaggttcgtccacccaggtcctctcgtactatgggcaggcctcctcaagattccaacgagcgcagaggatagagaccaaactgtctcacgacgttctgaacccagctcgcgtgccgctttgatcggcgaacagccgaacccttgggacctgctccagccccaggatgcgacgagccgacatcgaggtgccaaaccatcccgtcgatatggactcttgggaatgatcagcctgttatccccggggtaccttttatccgttgagcgatgccgcgcccgtgcgccggcaccggatcactatctccgactttcgtccctgctcgatccgtcgatctcgcagtcaagcccgcttgtgcgattacactcgacacccgattgccaaccgggccgagcggacctttgagcgcctccgttactctttgggaggcaaccgccccagttgaactacccgccaggcactgtccctgaacaggatgactgttcgaggttagacatcaaacgagaacagagcggtatttcaccttgcggctccgcggatgctggcgcacccgcctcgaagcctcccgcctatgctacacaatccgcgcctaatgccaataccaaggtatagtaaaggtcccggggtcttttcgtccttctgcgcttaacgagcatctttactcgtactgcaatttcgccgagctcctggtcgagacagtggggaagtcgttacgccattcgtgcaggtcggaacttacccgacaaggaatttcgctaccttaggatggttatagttaccaccgccgtttaccggggcttgaattcaccgcttcgcagaaagctgacggatcctcttaaccttccggcaccgggcaggcgtcagagcgtatacagcggcttgcgccttcgcacgctcctgtgtttttggtaaacagtcgctaccccctggcctgtgccaccccccgccgctcatcaccgcagggggtctcccttatgccgaaggcacgggagcaatttgccgagttccttgaccaggattcgctcgatcgctttggtattctctacctgaccaccagtgtcggtttggggtacgggcggcaacgcgcctgacgccgaagcttttctcggcaccacggatcaccggattcgggccgtaaggcccccatcatcacgcctcgccccgacgccccgcggatttgcctgcgggacgggctcgaacgcttgaccacggaaaaccacctccgcggccggctgccctgatgcgtcactcctgcgctgacctactacgaggggggatcccaacgcgcccgcgccgcgaccccccgaaaggggagacggcacggacccggaggttagcgccccaggcctcggttgtttcggttcgctgccggtacgggaatatcagcccgttcatccattcgactacgcctgtcggcctcgccttaggacccgactcacccggggacgacgaacgtggccccggaacccttggtcatccagcgggcgggattcgcacccgcctctcgctactcatgtctgcattctcactccccaacggtccacggcaggcttgcgccgccgcttcgccccgatggggacgctctcctacccagcatccaaacggacgctgccgcgtcttcggtggcgtgcttgagccccgctacattgtcggcgcggaaccactagaccagtgagctgttacgcactctttcaagggtggctgcttctgagccaacctcctggctgtctatgcgactccacatcctttcccacttagcacgcgcttggggaccttagacgacgatctgggctgtctccctttcgacgacggagcttatcccccgccgactcactgccgggatacgcgtcacgggtattcggagtttggctgctgtcggtacccgatacgggccctcaagcatccagtagctctaccccccggacgtaatccccgacgctgcacctaaatgcatttcggagagaaccagctatcacggaatttgattggcctttcacccctaaccccaagtcatccccccggttttcaacccaggtgggttcggtcctccacgcggtcttacccgcgcttcaacctgctcagggctagatcatcccgcttcgggtccaggacacgcgactcaaacgccttttgagactcgccttcgctacgcgtaccccacacgggttacgctcgccacgtgccactgactcgcagactcatttttcgataggcacgccgtcaccccgaaaggctccgacggtttgtaagcgcacggtttcagagactgtttcactcccctcccggggtgcttttcacctttccctcacggtactagttcgctatcggtcagacaggtatatctaggcttaccccacggtcggggcggattcacacgggattccacgagtcccgcgctacttgggagacacgatccggagacgacgcgcgttcggctacggggccatcaccctctgcggcccggcattcaatccggttcgcctcacacgccgttttatcactccggccgggcccgccaggacccggacacacgctccctcaacaccacgcgcgcaacggctggcgcctgtcacacgcgcgcggtttggcctgatccgctttcgctcgccactactcacggaacatcctttcctgcaggtactgagatgtttcacttccctgcgtaccccccgcgcgaacgcggtgccggcccatgacggccggcgggttcccccattcggaaatcctcggatcaaagccctgctggcggctccccgaggcatatcgcagcctcaaacgtccttcatcggtactgtctgccaaggcatccaccatacgcccttgcaagcaacccgcacgacccatccgggaacggcgggaaaccgcaagcccacggcaaaaactccgctggcaacacaaatcatcacacaaatgatcacacacaaaacgatcaaacaccagactccgaagagtccggcgaaatcaacagcagaagacacccccgaaagggcgtcccctgctcgcgtccactatccagttctcaaaccaccacgcacccgcacgcgagcccacccaccccaccaggggacgggcgaccggcacggggcacggaacaccagccacgccaaacggcgcggggtggcggtccgggaacccaaaagcatgcccgcaccactcctggacgcaccgcacgaccggcacgcccgaaggccgactccactcttccacaccagcaacccccacacacccggcacatccggggcaagggggcacacaccggccaccagacagtggcctgaaatctccgtagaaaggaggtgatccagccgcaccttccggtacggctaccttgttacgacttagtcccaatcacgagcctcaccttagacggctccatcccacaaggggttaggccaccggcttcgggtgctgcccactttcatgacttgacgggcggtgtgtacaaggcccgggaacgcattcaccgcggcgttgctgatccgcgattactagcgactccgccttcacggagccgggttgcaggctccgatccgaactgagaccggttttcagggatccgctccatgtcgccatgtcgcatcccgctgtaccggccattgtagcatgcgtgaagccctggacgtaaggggcatgatgatctgacgtcatccccaccttcctccgagttaaccccggcggtcccccgtgagttcccaccataacgtgctggcaacacggggcgagggttgcgctcgttgcgggacttaacccaacatctcacgacacgagctgacgacgaccatgcaccacctgtgaacccgccccgaagggaaacgccatctctggcgtcgtcgggaacatgtcaagcccaggtaaggttcttcgcgttgcatcgaattaatccgcatgctccgccgcttgtgcgggcccccgtcaatttctttgagttttagccttgcggccgtactccccaggcgggacgcttaacgcgttagctccgacacggaacacgtggaacgtgccccacatccagcgtccaccgtttacggcgtggactaccagggtatctaatcctgttcgctccccacgctttcgctcctcagcgtcagtgacggcccagagacctgccttcgccatcggtgttcttcccgatatctacacattccaccgttacaccgggaattccagtctcccctaccgcactccagcccgcccgtacccggcgcagatccaccgttaagcgatggactttcacaccggacgcgacgagccgcctacgagccctttacgcccaataaatccggataacgcttgcgccctacgtattaccgcggctgctggcacgtagttagccggcgcttattcgaaaggtacactcacccgaaggcttgctcccaaacaaaagaggtttacaacccgaaggcctccatccctcacgcggcgtcgctgcatcaggcttgcgcccattgtgcaatattccccactgctgcctcccgtaggagtctgggccgtatctcagtcccaatgtggccggtcgccctctcaggccggctacccgtcgaagccttggtgagccgttacctcaccaacaagctgataggacgcgaccccatcccacgccgatagaatctttcccacaatcacatgcgatcatgtggaacatccggcattaccacccgtttccaggagctattccggagcatggggcaggtcggtcacgcattactcacccgttcgccactctcaccaccaagcaagcttgatggatcccgttcgacttgcatgtgttaagcacgccgccagcgttcatcctgagccagaatcgaaccctccacaaaaaagcgaaagggaaccattgatgaccccaaaaattgacgcgacttcttaataaggaaaagaagtccgcacgaaaaaccccggcccccatcaagcgccctcgcgcacccacgggcaaacacccgcaggcgggaaccggactggcataaaatcaaccaaaaaagtagtacaaacacactcttgagttctcaaaccaccacacatcaacaagcttcgttctcaggaggagaagtccgccgtgctgagcagcaagagataaacatacacgggatgggcgaacaacgcaaaccgatgggcgcaggaaagctaggaaccgttgcaatgacgcggttccttcggcgtgtcgcaaaagcctgtttttggccttctgataccagaatagacctcgaataccgctccacacagcactacactcactgtatttcggcgtgtcgcggattgttcaccgcccattcaccgcgtccgcgtcgccgcatgccgggtacagcgcgtcctaatgtttcagtatgaacgaacgaaacatcatcgaaacccaaccggagcgcacggatctgccgctcatcgtgattcccgtgatcgtcgaatcaatgatcgagccgttcgccgccaacttccccctgctgcacgatatcgcccgcatccgcatgcactgcgatttcacgctggacaccgacaccatcctcgaacgcaccaaggatgccgaagccgtcatcgtcatcggcttccacatcaccgatgacatattggacgcgatgaccgttcggggccatgtctcgtgctttgcgttcggcggcaccggcgtcgccagctacatcaatcttcccgtcgcgcgcgagcgtggcatccgcgtgtgcaacgtcgtgcattacggcgaccatgccgtggccgagcacgcattcgccctgatcatggagctcgcccgacaggtcggccggcttgacgcgcaggtgcgtcgcggcgactggggcggcatcgacggcatcgggctgcacggcaagaagctcggtctggtcggattcggcggcatcggccggaccgtcgcccgcatcgccaatggtttcggcatgaagacactggtatggaacagccatgtgcacggcatcgatgggttggacatcaccctcattgacgatatggatgaggtgttcgcgcagtcggatatcatcagcctgcatctgccgctgctcgacggtaccgcaggcatcatcacgtctcggcagctcgaccggatgcgccccggttcgatgatcgtcaataccgcccgcgcagaaatcatcgaaccgggggcgttgacccgccggcttcaacgaggcgacgtgcgtgcggccatcgacgtgttcgaccatgagccgctgccgatggacgacccgctgcgatccttggacaatgtcgtattgacgccgcatgtggcatggcgtgacgacgaggcctgcgtcaatctgacccgacaggtgatcgacgcggtggcctcgtatttcactggcggcgactataacgccgtgccgtagcaccagtcagctgtggcggcgcttgccgcggcaccgctacagtgaggcggcttcgataagacgaaccgtatattcggacttgggatcgcccagaatgcttgcagtggagccggcctccaccacatgaccgtcgtgcagcacgagaatacggtccgctatatgctgcacgacgcccaggtcgtgcgaaaccatgatcagcgccgtggacggcctggcctgtcggatcgcggcgaacgtctccaggatctgcaggcgagccggcacatcgatggcgctcatcggctcatcggcgagtatcacgtccggctcggtgatgatcgcgcgggcgatggcgacgcgctgcgcctggccgccggacagatccattggatatcggtcgatgaacacgccggcatccaatccgacccgttccagcgccgcgtgcacgttctcgcgaatgcctgcggggtcgggcctgctcccccgccgtcgcagggacaacggctcggcgacgatatcgccgaccgtccatctggggtccagtgatccgtagggatcctgatatatcagtccggaatcgtggcgcagccgccgcagaccggagccgccacgcagcaccggcgtgccgcggtactccacagtgccgccatcggcgttctccaaccccagcatgatgcgggtcaacgtcgacttgccggagccggagccgccgatcacagcaaggcactccccctcatatacgtccacgtccacgtcgaacagcacctgatgcgcggcggcgcgccggccgaacgacttgcagatcgaccgcgcgcccaatacgacggcgggcctgtcgagtttccgctcggaaccacttgttgacggttccgtcatggagggtgacgcggcaacttgggatatacggaaatcgctcacgatgactgctccttatccccggcatccccggcatgcaatgtcagttcccgggcagccccgaccagccgccgcgtccgctcgtcgcgcggcgaggcgagcacgtcggcggtgcgccctgactccactatccgcccttcgtcaagcacatagcagtgcgtcgtcgcgtgggccagcacggcgaaatcatgggtgatgaacagcagtgacgcgcccatgtcatcgaccagggagaccagcaggcgcacgatctgccgctgggtgatcgaatcaagcgcggtcgtcggctcgtcggcgatgatgaaacgcggagaggtaatcagcgcagtggcgatgccgacgcgctgctgctgcccgccggacaactcgtgggggaatttgccgaggacgtcgtccggcagcccgaccttgcggatcatcgcgcggacacgctcccgacgctcgacggcggtcaggtcataatggagccgcagcggtagtccgacctgcttctccacactcatcaccggattgagggatgcggccggattctggaacaccatgccggcgtaacggccacggatgtcggcaagacgcctgtcatccgtaccgaccgtctccatgccgcccatcactaccgagccggacaccacggcatgcgtcggcagcaggccgagcatcgccttggaaatcatcgacttgccggagcccgatgcccccaccaggccgacgcgctgcgcgtcggcgatatccaagtcgacgccgcgcacgatgggcgcaccgccgatggcaatgttcaggtcacgaaccgtaacgctcatcgcgcacctcgcaatcggggattcgtcaatgggtcggcggcgtcgcgcagcgcgtcgccgaacaggttcaacgcgaccaccacgagcgtgacgatcagccccggccacagcacggtcagcggatacacgttgatgaacttcacggacgtggccagggagtgcccccaactgggcacgcccgacggcacgccgatgccaaggtacgtcagaccgctttcggccaacaccgcggtgcctgccgacagtgacagctgcaccgtcagcacaggcgagatattcggcaggatatggcgcgccagcacgttcagtcccgaagcgccgttcgacagcgccgactcgacataggacgaacgcgcggcgagcatcgcctgagggcgggacacgcgcgccagattcaacccgtatccgaatccgcacgcgatcacgatgacggccacggacggaccgagcggcacggcgagaatcagcgcgatcagcaccgtgggaatggatatcagcgcgtcgacgacgaccaccgatgccgccgaaagcgccgcgtgcctggacaccatcaacgccacgatggccagtccgaacaccgcagcgacggccacggtcagcacgacgatcagcaggttggtgcgggagccggccagcaaccagctgaacacgtcggcaccggtgccgtcggttcccagccagtggtcgcgcgacggcttcgcccacacatggtagccgtcggtgctccacagcgaatacggggtccagaccagcgacaccgcggatgatgccagccataggccgagcacgatcagcgagaacttgcccgcgacgtggccccacatcgtacccagaacgacacgtgcggcgcacacgccgcgggcagtgcgggcacggtcttgcgccgtcgtcgcgctgttcccggaagacggttttccggctccggcttgagtcttggcatcttgagtcttggcatcgaccggtcgcgtcatgcgttcacctccgtgacatcgtcagccgacttcagccgcgggtcaagcacccgatgcagcaggtcgaccagcaggccgatcagcaggaaaaaagccgccagcatgaacagctcgctctgcacggcgatgagatcacggttgccgacatcggtcaccagaccgttgccgatgcccggcagcgcgaacaggttctcgatgaccatgacgccggtgaccatctccgcgaacgtcagtccgatgacggagaccagttgcggcatggcgaggcgcaatcccacgcgcagcaccgcctgccggcgggtcatgccacaggacatggccatgtcgatgtaaccggaggatgccagtccgcccaatgccgagcgggtgtaccgcatcagcccggcacccacgatgatgcccaccgagcaggctggcaacaccagcgacatcagcgccgaaccgaaatcggaccacccgccttgggggaatccctgcgacggaaacacgccaatcagtccggttccgcgcgagaacagcaggatcagcagcagaccgccccacagcgcgggcacggcgccgccgatgatggcgaccatgtgaaacatgccgcgagcggcgcgactgcgggccagtgtcgcctcgcatcccagcggaatgcccagccccatcgcgataagcagcccgaggacgatcagcgggaacgtcaccgatgcccgctcgccgacctgggcgctgatggagcggccggtcagaatggaggtgccgaaatcaccgtgcagcaacgcgccgatccagtcggcgtattgcgcgatcagcggccggtccagaccgagttgcgagcgcagcgcggcgacccgttccggcggggaattcagcccggccatcaccgaggccacgtcgccgggcagcacgcgcaatgccgcgaacacgacgatggagatgccgaacagcgccgccacgaacagcagcagacggcgtatgacgaatcgcaagtggactccttccggtgagagcgccgcgcatcccgtcacagcccccgaccccgacggccggaatcgcctgtgccgggatacgcggcgatttcagccgtcacttggtgtaggcgacgttgtacagcggcaacagggtctggttgaggttgatcgggaagccggtgacgcccttcgcgtacgcggtggtgacgcggtagttgaacagccagtcggcgggggcgtcttcggacaccttgcgtgcggcttcggcgagcagcttgtcgcggtcgtcgtcgttcgtggcggcgatggccttggcgtacagggcctggacctccttgttgtcgtagttgtagtagtaggtcgggtcggcccactggtagaagtcgtggctttcgttgtggtcaacgagcgagatgtcgtaattcctgttcgtatacacgtcctgcagccacgtggagaattcgaccacgttgaccttcaggtcgatgccgatcttcttgagctggctgcgcagctggtcgccgatctcggtgccgtatatgttcgcgtaggtcaggctcagctgcagcggcttcgattcggagtatcccgcctcggacatcagcgacttcgccttgtcaaggtcgtacgggtagatgccggtcaggtcctcgtagccggggtcgagggaggggatcgggccgccgagggcggtgtccgaaccgccgcgcgaggcgatgatctccttatggttgatggcgtagcgaatcgcctggcgcacgcgcttgtcggaggtcttcgctccggtgccgttgaacgcgagcacgaatttgtcggtatcgtcgccggccttgaccacgtaatggtcgctgtccttggtgaacggttcggccaggttctcgctgatcggcgcgagcacctgcacatcgccggacttgagcgcgttcacggccgcgttgtcgtcggtgaaataccgcacgacgaccgtgtcggtcttcgccttgttggcgccccagtagttggggttcgccttgagcgttatggacgagttggtgacgaacttctcgacggtgtacgggccggagccgatcgcctgggtcttcgcgtcgtatttcgcgtccttgtcgaacacgagtccgggacggccggtcagcacccacagcaggttcgcgtacggcgcgctgagcttgagttcgacggtgttcgggtcgctcgctttgacggagacgaagttgaccagcgaatcggcgtcatggtactgcttcgtgacgagctcgttgatggaccatgccacgtcgtcggcgtcgagcttgtctccgttcgagaacgtcatgccgtcattgagatgaaacgtgtatgtggtgccgtcgtcgctgacatcccatgtcttcgcgatggctggtacgacctgattgtgctcgtcgcgcgccacgagtccctcgtagacgttgccgatgagtacctggtcgatggccgatccggcggtgttgcggatgtcgaggttggtgggcgcgagtttcaacccgatggtgaccgtatcgttcgccttggcgcccgtcgtgtcgtttttgcgtccggcgaacgccgcgatgcatcccgcgacgacggcgacgaccgcgatcacggcgacgatggcgacgatccaccatgtagcccgccggtgcccggcggcgttcttggcgcggctctccagctgcgcgtccatgctggccgcggcgctctcgttcgtcgcagcggtttcctgtgtgttcagatcttcgttgtcggttgcgccggcgtcgccgtgcgcaccatggttttcagtcatgattcctcttcatttgtattgtgatactgcggctggccgcccttgcgggtcgtccgccacaggacattgtagcgtcaggtcgaacccgactcgcgcgcatgccgcgctggcgttctatcatgggtgaaggcatccgttcatgatgcgcccacgcatcacgattcataaggggattcgcatgctcgtagcggtcgacatcggcaacaccaacatcgttctcggcttcctggacggcgacgacatcatcggcacctaccgaatcacgacgaaatcgaaccacacgtccgacgagtacggcctgatgatcacgcagttcctcgcgctgagcggcctgcgtccctctgatatcgatgacgtgatcatcgcgtccgtcgtgccgaaggtcatgcactcgttccgtgcaagcatcatcaagttcctgaacatcaatcccatggtggtcggccccggaatcaaaaccggcatcaacattcgcatcgacgacccgaagtcgctgggttcggactgcctcgccgactgcgtgggcgcgtattacacgtacggcggtccggtgctggtcgccgatttcggcaccgccacgacgttcaactacgtcaatgacgagggcgtgatcacctgcggcctgatcaccacgggcatccgcacggccgcggcggccttgtggggcgagacggcccagctgcccgaggtggaaatcaccaagcctaaatccattctcgccacaggcacgaagaccgcgatgcaggccggactctactacaacttcctcggcggcatcgaacgcacgatccggcagttccgcatggagctggacgagccgttcaccgtcgtggcgaccggcggcctgggccgcgtgttcaaggatgacacggagctgatcgacgtgtatgaccccgagctgatcttcaaaggcatggcgctgatccacagccgcaactcgcatcgctgaatcgcgcgggcaggcagcgggttcgcgtgaccggcttcggcattggccacgccggcgcaggtcatttgatggtgaagccctgattgacgccgtactccttgaggtcgcgctgccatgcggcgatgccgctcatcagcgtgatcttcttgccaggtcggtccggcagtgtaatcggaccgccatcgtcattggtcagtcctgcgtccttgcgcgccttggcccggtcgtatgcctgcttggccgccgaccacgtgtatgcgtctgcggtggcgctgcggaagtggctgcgcgcgtacacttcgaacggcaggtactggtatccgaccgacacggactccgctgcctcggacagcacctcgttgaaccgctgcccgccgaaatactccacctcggcgtgatgctcactggtgacggtggtcttgttgaggaattcgccgctgttcaacgtcgcattgtcggccgggaaggcgccaccatcgacgcgggtcttgatgccggatttgttgtggcagacataatccacgaaacggaatgccgcttcaggcttgcgtgtggtgtgcagcacgcccagcgcggagccgccgttctcggcattggtgaccgtgccgtcctgagtcggcatgcgcgtgacgcgccacagtcccgatgtgcccggcacgtcggccagcagcagcgacggcatccaggctccggcgaacacggaggcgaccgacccgccacccagcgcacgtttccaatcctcggaccagactttgagatgggtgttgaccagtccctcgtcgatcatgcgctgccagaattcggtgaacgtcctggttccggcgtcgcccttgagatcgacggtcacggtcttgccgtcggatgacgtatggaaaggccgaccgcccgcgagccatatcatcgcattgtagaagctggcgtcaccggcgtctgcggcgatgtacacgccgatgtttttcagctttctcgcggcctcgtaataatcatcccatgtggtgatcttggtcgcgtcgacaccggcctggcggaatgcgtcatcgttgtagaagaacgccataggcccggaatccatgggtagcgcgtacgtgcgctgcgcgagctgcaccgacgcccaggtgcctggggtgaagaacgagctgtagctgccgacacgaccggtgaggtccatcagctggccgctcaccgcgtactgcggcagggcatagtattcgagctgcaccacgtcgggcgtgccgtacccgtcctgtatagcgctgttgaggtggtcgtagccgctgatgttgttcagcttcacgcggacgtctggattagccttctcgaaatcggcgatcagcgtcgtcatgctgggttcccacgaccagacggtgatgacggtgcgcgtgtccggctgcccgcaggaggcgaccgccagcgtcatcgcacagatcgtgagcaacgccgagatacgcaggcgcagccgccgcaaccgtgccgatatcgtcatgtcatctccttagcgtgctcgatgtatcgggaagaattcgctcatcgtagagtctacacgcgcgctgcaacaggtgaagatgcgtgaaggcccctccctgatgaggggaggggccttcacacgaggaagggatgaccgaaggtcaccgtattccggtcattaccacgccagattgtttgactgcgaaggttacttgacggtgtagccctgatccttcgcgtagtccttcagagcctgttcccaaagcggcgacgccatcgctcagcttctggttgccggtgtaggacttgccaaggtagtcgccgaagaaaccgcgggccttgatcttcgggtcgccagtcaggttgatggtgaccgcctcgccttcggtggagaacggcgtcgcactggccagccaggtcatcgagtcgtagaagccggcgccaccggtgtcggacgtgatgtagtagttgtcgccaagggtgtgaatcttcttggcgtcctgatagaactcgtcccaggtcttgttgccctggccggtgttcaccaggttgacattgatgccggtcttcttttttgaagtccttggccacctgagtcagcgtaggccccaagcccacacggtgatttccttgacgtcgccttcctgcttcggagcggagctgctgcttgagttgccgcacgcagcgacgctgaccagcatcgccgcagcccggtaagcgccagcgccttctttcccataaggcgtatgtcgcgtgtcaccgcaaacatacgcctttcctaagcccttacagcccagtgtttccaacgattatcgcctgagcacgacaacgcccgtcggatcgatggtggcccgcccgtcgtcgacatgcgcgagcgaagccgcgatggcctccccctcaacgtcgacggtcaccggttcatgggtgcggttgaacacgaactcgaagtggctcgccgccgcggcgtcggcgcgttcgacacgcagcacgcggccatcaccggcgaggtccgacagccccatggaacccagcatcgccggcaggctcttcgcaagcccctgacggcccagacggcatccgacatatacggtccgcccgtcgccatacccgttggccacgatggccggcacctcgttcatgccggtccagcgttccgccttataggaggccagtaccgtggacgtgtcggccgtggacgtgatcacatcggcgaagtcatgcgccaccgtgccattgtccaggtcgaggtgatccaatgcgcccggcatgtcgttgcccatcggggcgaactcttcgacgcgcacgccgacgacgtcacgaatcgagcccgggtagccgccaagccagatgtggtcgttctcgtcgctcaatccggtgtagtacgtcacgaacaacttgccgccgttcgccacgaactcccgaaccctacggctcgtctcttcggacagcaaatacacacacggcagcacggcaatctcgtaggaatcccaatcggaccgcaccggaaccacgtcggcggtgatgccgttgtcggcaagcgcgcggaaccaatccaacggctcggtccaatgatcgacctgctgggtcgggttcgcggtgtactcggtggcccactgggactcgtagtcgaacacgacggcgaccttggacttgaccgtcttggtgcccatcagaccctcgtcggacagacgtcccagatcggcacccagctcgcacacatcacggaagatctgcgaatcctcgcccgcatgcggcaccatcgaggagtgccacttctccgcgccggccttggactgtcgccactggaaatagcagatggcgtcggcgcccatggcgacctgcgcgagggagtcgcgcacgaccgagcccggctccgcacggtagttgatcggacgccaattcaccgcggaggtggaatgctccatctggaaccacggttccttgcgtgaaatgccgtccatcagcgacgcggcgtacgcaacctcgtcgaaatgggcctcgcccggcgtgaagtagtggtcgttggagacgaaatcgacctccgcaccccagtcgtcatagtcaagcatcgagccgccggcggacaccatgaaattggtggtcagcggcagacccggcgtgatggactccagcacgtcacgttcggcgatgtagagctccttgagcgcgtcggagctgaaccgcttgtagtcgagcagcttgcccgggttcatgaagttgccgtcaccgatgtagcgaggcgggatgatctcggagaaatcgttcatgtgctgggcccagaacgctgttccccaggcctcgttcaccgcgtcgatggtcttgtagcgcttcttgcaccacttctggaaggcgcgcatggcgtcgtccgagtagtcgaagcggttgtggcagccgtattcgttgctcacgtgccaggccaccacgtatgggttgcccttatagtgctcggccatacgacggcacaggttcagcgcgtactcgcggaacacagggctcgtcggacgccaatgctcacgggcgcccggccacacggtgtcgccgcgctcgtccttccacagcacctccggatgggcctgggtcagccacatcggcggggaggcggtggcggaggcgaggtctacggcgatgcccgccttgccgagcttatcgatggcacggtccagccagtcgaaatcgtacttgccttcctccggctcgatcttcgcccatgagaagatgccgactgatacaaggttgacgccggccttcttcatcagacggatatcatcgtcccagacctcctccggccattggtcgggattgtaatcaccgccataccagagacgggattcggcgcccttcagcggctgcggccaactgtgctttctgcgtttactcatgttccgctccattacttgttcattgtctgacgcccccggccgaaccgtcgcatcgacgaaaaatcaactgtgacatgcgagcgggctggtgccatatcgcgccagcccgcatcgcgcacggtgagcgtccctccatatcatatacatgttccgtatggagagccagccgctaggcgcacgtcaagaccgtcagacgaacgtgacgcatgctgcaagcggacactggccctcccgcgagatcactccttgacggcgccggcggcgaggccggactgccagtacttctgcaggcacaggaacgcgatgaccagcgggatgatcgtgatcagcgagcccgtgatgaccaggttctggatggcttggccgcccgcagtggacgcttggtccttccactggttcagaccgatggtcagcgggaaccagtccgagtccttcaacatgatcagcggcagaaagcagtcgttccacgtggcaacgatcgtgaacagggccgccagcgcgatgcccggcaccgagatcgagccgatgatcaccgcggacacggccttgcggcccgggaagcggaacttcgccaaagcgtagccgcccatgatcgccagcagggtcgcgccgcccgcgcccaccaccacatagatcagcgtgttgaccagccagcgcgcgaagatgccgtcgtcataggtgaacaccgtcacgatgttgtcccacagcgcgaacgtcttgccaaagcccaggccgaacgcgcccgtgaagtccgattgggtcttcgtcgcgttgatgagcatggagacgaacgggaacaggcagcagaccgcgaagatcggcacgatgaacacgaacaccaacgcgaacggccacatgaacttccaaccacgccaatcccgcttgtgcttattcacacgagccaaaggcgacacactcaccgatgtcatgcccctctccttcgaaggactcgcagcgaagcacaccgcacagaacttgccacaacgcaacagctcattgaacttgttccgcgaaatgcaccctctctaaatgtttgcgttaccataatatcaatattgttggaattgtccacttgagggtacggcaagtcatcaggagatggtctatactgatggtaaccaaaacatagaaatgccaaaaaaacaagcaggaaccatggatcattcgcaacccgcttccatgcaggacgtggcgaaagccgccagcgtgtcgccccagacggtctcacgagtcgccaacggaagcaatgccgtccgaccggaaacacggcagcgtgtggaagccgccatggccaagctgggttaccggcccaactatgcggccagggcgcttaagcacggcaagttcaaggatgtcggcgtcgtgctgttcaacatgctcacctatggcaacgcgcgtatcctcggcggcatcgccgacgcggcgaacagcaatggttacgccatcacgatgcagtccttcggacgcaatcgggaacgcaccctgcatgccgccatcgagcgtatgaagcagcttcccgtggacggcgtcatcgccgtcatggaggagcacgtgacggacttctcggagttccgcccgcccaaggagctgccggtcgtcatcatctccgaggatcccgcgaactactgccccaccatcgatgccgaccagtacggctgctcagccgccgtcgtggactatctgctcagcaaggggcacaagaccgtctaccacatcgccgggccgtcctcgtcgcgagccgcggaaagccgcgcgcaggggtggcatgacacgctcgaccaactggggctgcgcatccctccgacctatatgggcgactgggaggcggacagcggatatcaggccggactcgcgctggctcacgaccccgattgcaccgcgatctatgcggccaacgaccagatggcgtatggcgcgatgctcggattgcaggccgccggcaaacgcgtgccggaagacgtcagcatcgtcggagtggacgattcgctgagcgggacgattccacggctgtcgctgaccaccatgcgcatgaaattcaacgacatcggacgcgaggcgttcttcatgaccaagcgtctgtgcgagggccttcgagtgccttcgggcgtgaagaccgtggttcccgcggagctggtggaacgcgggtcggtgcgcgacctggaatcctagacgacgaatctcaagcgataatggcctcggcctcgccggtgtcgaacgggcgaggccgaggccattatccgttcagcgccggcgattcgtcagaggttcgccggctacataacgccttacgttctccagtgcgatacatccggtcgatgccttccgccgtgcgggtcgggtcacgacgcactcccagcgtgttcgcgcccatggccttgcatatgctggcgaaatgcgagccgatgtccccggtgccgaccaccagcaccgtggagccgcgcacgctcagcgcacggccgacatcgtgccatcgccgctccccttgttgacgggcatatatcgacattgtaggcgcacggaatattgccgcgacgccggtgataaaaatgacgatgcgccggcccgtcttttctaggagacgggccggcgcatcagacggccggagaaccgatgttaccggttggacttacgcttggcttcaagcgtcacgaccgcacccgctaccatcgcgagtgcagcgaagacaacgcccattgtggaggcgccggtctttgcgatcacgtcgccgggcttcttgccgtcgccgggcttgttgccttcaccaggcttttcaccttcaccgccgggggtcgtcggcttggtcttcagcgcgtcgatcgccgcagacagagccgcctcggcggcatcgacatcatcctggctcaccttgtcgtcgtcatagaccttgagcgctgcggcgagcttgtcatcaagcaccttgagcgactcgtccgtataggcggaacggtcgatcgcctgagccttggtgatcgtggcgtgcagcttgtccttgttgacttcggtcggaggcttctcgccacccttcttggtgaacgtcagctcatacgtgactggggacgtcacaccatccgggaagcggtatccgtcggcgggctcggcggtgaccgtgacggtcacgtcctcatcgcccacgttcactacggaaccagcggccaacaccttgccgtcgaccttgtacacgactccctcgatgtcggggatggtgtatgtatcggcatcatcgtccactgtcggcttctgcggggtagcgaccttgtcctcctctacggccgtgggcagcaactcgacattcatttccgccgcggagccgaagttcgatccggaataatcggtcttgatgacaaacttgacgtaccgtccgttcttgggggtcagcttgatgcgctgcgtgtaggcgacgttcttcaacgtgcccgaggccacagaggctccaaaatcgttgggatcgtcggagacatacacctcgtaatccttggcggcaccgttattgttgccgtcgatacgggcgaggtagtcgaagtaggcgacgttctcacgcgattcgccgagatcgagagtcacccaatgcggggcggacgcggcggtcgggctgtactgggagtgccagttcgtcgacgagtcgccgtcgagcgccttcgccgcctctgcgccggagttctgcgacgactgggcgtgcacgctgatctcatcctgcgggacatacacgcgggaggccggtgcagtggcggaatcggccacgacccagccggcgtcgtccttgccgagtgccttcagcgcctgcttcagcgtcagcccggcggtcatgccgtcgaacctcgcggtggtggctttgtcgcttttgccgtatgtcgtcacggtgatgggctcgtccttggtgccgtagccgaagacggcgaagtccccggtcagctcggtgcccgccttgacgaagatcacggagcctggcgcgacggtcacatcgtgcagctgctcgatcgacgtcatgggcttgtccttcgtaaatccatctcccgcggtctgcgccgtcgggtcgatgtagtaggcgcgggcgccggtctgaatctcggattcggtgtggaacacctcaagacggctcagacgcaccggaccgcgggaggagttgaccaccagacggatggcatcgatgttctgggacgtgaagcgaaggtcgcgctgctgcccgaccgtcgtcatagtcgccagattcgtccatgttccattgactcgtccctgcagagtggcgctttcgatctgctggccggcattgcgcacgtcctcggagatcttcactgcatccacggcgacagtgctgcccagatcgatggtgtacgtcggcgtattacccacggccttgtcggaggagagcttcgaaccgtcggtcagcttcggggccgctaccgcggtgtcgttcgcggacgcggcgacggtcgcgctcttgcccagggcaagatcggtgccgtagcgtcgggcgagctcctcgcccagccccttaagtcccgcggcatccgcatcggcgagcttgccggtatcggacggtgggacgttcagcagatactgcgagttgcgtcccgtggactgctcgtagtacttcacgacttgagctacggacgccggcgattggctggcatggtagaaccatccgggccggttcttggcgtcgacttcggccggataccagtgcagctggttggcggcgccgctgcggatctcggacagcacgctcgacatgctgccaagcgtaccgtcggcggccatctggccaggcttgagcgacaccttgtccacgccgtcgttgtatgccgcctgcgggctccactcggtctgacgggcccagccgtcctcgttgcccacccatcgggcatcgtatgcggcgttggcctgaattgcctggggctgaagccggcggatcatctcgtagaacacgccatagtcgtaatgctcagtgcctgcggtgttgccttgggcaccgtcgaaccagacctcggagatgtcgccgtactcagtcagcagctcatagagctggttgagcatgtaggcgccgtaatccgtggccttgtacttgaacgtgggcagtttgccggaagccaccttgccggcgcggtcgtcgttctccaccagcgtggggatcgtgcgctcgacgcgtgcggagttgttgccccagacgcccttcctctccatgtaggaatcggccggcgaatagtagatgccgaccttcaggccgtacttcttcgccgaggcgacaatcttgcggaacaggtccttctcccccgtgcgcttggcgacggcggtgtttgcccagtcgtgctcggtgttgtaccgcgagtcgtacagctcgaagccgtcatggtgcttgaccgtcaccatgatcatcttgaagccaccgtcggcgaaggacttcgcccactggtcggtgtcgaggccggtcgggtcgatgcgggagggatcctcgttaccgtgaccccactcctggttgtagtacgtgttgatgccgtaatggaggaatccgatctgaccccagtcgatgtagtcggcctgcccttcggtcggacgcagcttggacagcttggtcttaagcgcggcctcgcactcggcgggctccacgtcgaaggtattcgcctccttgatgcccgacgtgtcgcagctgacctgagagtagaccagcttgaattcgttggtggtgaagttcgcggaggttttggccaggcggatctcgctcagcgagccgacgaagccgcggctgagcgcggcggaatgcacttcgttgccgaagccgaccttgcccttgatgcccgaattcaggtaagccagaccggtgatgtccttggtctgggcgtcgccgccatccacgcgcatgacgagcttcgtgtcggtgccggcctcattgggcacgtacgccaccgacacgacgtgctccgcacccgtggcggccgcggactcgatcttgtggtcggtccaattatcgccggacttggtggaggcaccgaacacaagcttgttcgactcgtagcgcaggaacaggttgccgcccgcgccgaacagggtctggttgtcgccggtctgcgtcggggtgaagcgcagctccgcgaccagcggcgtggtgatggcctcgttgtcaccgagggtgaagtccgtgggcgtgaaatcgaatccggccgtgccgccgcccagcgtgacggcggagttcgagatggacggattggccgagcgcgacaccagcgagcccagcatctgctcgccgctcgccgcggtatatgaggtgccgctgaacgtgccgttgaaatcgacatgcagtagctgggatgcgtcaagaatctcccacgggtcgtccgaatcggcgacacgcacgcggaacacgtcaccggcaagaccgcggctcgccgcgccgggagcggggttcacctcgtagccgatcccgaacttgttcccgacggaatcgctgacggccgcgagctcgccggccgcggaggtggcggtctcgccggccacgccatccaccttcaactgcaacgtcgaggcagcgccgtcgactcccggcagatatgtcagctggatgatgtgcttcacattgttggaaggcagcgtcacggacttcttgtagtcgttccatgtattgccggaagggttcgtggagaagccgtattcgaggttgctgccgttcgcccgcacgaagatgttgcccatggcggagaacaatgtggcgaggttgctgggcgtctgcttcgtacagtattccatttcggcgcggaatcccttgttcgccttcccgctcgcgctgaagctcacgttcgaggtgaaggtcacgccgttggtgccgccagcgagggtgatgccgccgccgtcaagcttggtcggtatgcggccgtgcttggtcacggagcccctcgccacctcgtcgccacctgtggtgtaggtgtcttcagcgaacgtgccgccgaacgacacatcgaggtattccgtcggattcgccgccaccgcgacgttcggcaatgccacgaacgcgagcgccgagaccgctatcaatgcggtgagtctgcgcagccacgaacgcgagcatcctcttgatgctgtgtgtagcatatttcaatcctctatgattttgaacattcttgtacttcttgccggaatctttgcatcggaggcacgacatcgttccgccaagtgttcggattcccgcagacagtctatcagatcaggctgatttaaggtacccccgttgtctaaatgaaagtgcaacacccgttagattggagattgtccggataaccagtccgaagggatgtcgcacctatgggatgagcatgttcgcgcctgtcggaagagggacgccaggtcatccggatcgagatcggcaacggcgccggcatccgcgggatcggtctgatgcccggccgcaacgcctcgacggtcagcagggagatcagacgcaacacgtggttcccgtccgacgagaacgagtcctaccggccgaaacggctgaagacggccccgtggacgggcggatactacatcgccggccccgcgcagcgcaaggccgaccgccggcaggcccctccacggggctcccgcgcggcacatccacggcagggcgttgacgaacgtgtggttgccgcgccgccacgttgccgcgccggcgcggcaacggatgcgcgaccctcatgaaccggtcaagcatgatgccatacctcggcatacacatacgacaactatcacgcaaaacttaaatagcgtaaacacaccctagatgccattgtaggccactcaactacggcatacatttgcattctccattccagcccccgcgttagaatgacttataaatcggttcgctttaagcaataccccaagggtgtggcagtactcttggggtattttcatcaggcgggaaccgccaaacatgttcgaatggacaaaccccggcaaccgaaagcacccgggatccatcagcatgaggcaattacacgccgaacggcacggcatgtgcataagctgtctcgggggcaatgtcgatagtgccgttatcccattcgacagtactcacaccggctctggccgtcctgaaaacattcgggtcacgcaaccgcttgaacacgccatcgtccatatagggcgacatgtcaagcacgccgcaatggccatcggaaaaacgcaaagccacgtgcgagccatccaacgccacagcgtcagtaacccacacttcatcgggaacgctcacaataaacctcgtttcatagggcaagcggagcaatcggataaacattagcttttcgtgggctgccgcgcccgtaaagagcgccggcggccccggcggatcagtccgccgaagaatcggaatcaggatcaagcagtttacgcggattacgcaccttgagcgcgtcgcaaatacgtatcgcaacatcgagactcattccgctcgacgggcgcacgccggtctcgaaggccgctatacgctgtcgtgtcacgccggttttctcggccaactcgcgttgcgtcattccgcgtttcgttctcaaatccttcaaccccatgcctcactcctttcgatggtgaggcgattgtaagccactcagacggcccggggcaattccatgccggacaccgcgccacgttggcgactcgacgacggttcggccctgcgcgatgtgagggtgcaacggtgtaacagccgctataagggtcatttcaatccacgcaccccgtgaggggtgcgactgcgagaatggacttcgtattccaagatacgggcactccgaccactccttagcatcgattgtacggtacaatccatccgtatcttccccgatacgcaatcgctgaatcgacatgccagcagatcattcactcttgagttatcaaacaacaagaagaacacacaccgtccccaaaaactataatctgcggtacgaacgactcagtgcttcatgagagctcagggctcacaccgcacaagacaacttggcagaacacaacgagcatcgcgaacggctgcgccgtggaccggctcaccgccagccaactcaacagcgacgcgattccgccgagcgtcaaggcggtgtggcatgggaatgaagcactctgggcacagattcgtaagcaggaatctggctttgccgactgtgtacagcgtgaatagctcttactctgatcacagtgctccaatgcattcgtccggctaaatgattatttgcttgagctcgtatcatcagtttttgcatatcggtttagcaacaatgtcaatacgactgaactgaaaaatgttctttcgatctcaacaaaggcattaaagccgcaggagcatgctggcgaaatatgggaacattacagcattccagcatttgacgaaaatcatagacctgtttttgaaccggcgtcaggaatcaagagcaacaagtaccaaatcgacagtgagtgcattcttatctctaagctaaatccatccaccaagcgaatctggatgccatattgctcaagtaataacgcagtgtgttcaacagaattcattgtgtatagaccatatttgaaggaatataagagcttttactatgcggccattgattcgcctaggtttactgactatctgcttgagcacgtaagtggttccacgggaagtcgtcagagagctcagtccaaagacactcttaactacttgatgccaaatccaggtaaagaagaaatcaaggatttctgcacttttgctgatccgatatatcgtcatatccagataaatgaacaacagacagcaaaactcgaactgctacgtgacgcactccttcccaaactcatgtctggcgaaattgacgtttcgaaggttgatctcacgcagctaacaaataatcatttagctggttgttaagctcgattttcctatcaaacaaactaagaacatttgcaatagcattttgttccgccatcgaaggaagaggcaatttcatggcacaaagattactctggctcagctttggctgcgtagatcctgttacgtaggcagaaatatcagtcatattaagaagatgtctcagaaaaacgagattacacttttcggactcagcaataacatgcgcatgattattcactctgaattttccagaagccgcattcgcaataggattcttgcgactcctaagattttccccatcttcagcaaccagtaggtaatctccctcataggtgtaatcatctagataatcgacaataccttgagctccgtaataaggataggaaccttttctgtcctttctgtccctagaagatatcggctctctcttgacatcttcaagctcgataacatcacctagacgcgtcagctgctcacatgccatagccgatggcctccagattcttcttgatctgctcttgcagacggttggattcttcgaagcatttggcgatctcgtcggtcagacgggtcatcttctcctcgaatggctcatcgtcttcttccacttcggcgacaccgacgtaacggcccggagtcaggatgtaatcctgcgccttgatatcttccgtcgtggcgatggcggagaagcccttctccgtttccagagtgccgtcacggaacgcgtcgaacgcagtcgataccttggcgatgtcctcatcggtgaactcgcggagcctacgggacaccatggttcccatatcacgcgcgtcgatgaacaacgtcttgccggactgcttcttgttcttggtgatgatccacaagctcacaggtataccggtgctgtagaaaagcttgtccggcattgcgatgatgccctcgaccagatcggcatccacgatcttggcgcggatctcgccctcgttgttcgtctggctggacaacgcgccgttcgccagaaccatgcccatgcggccggaacggttgagatggtggatcatgtgctggacccatgcgaagttggcgttgccctccggtggggtgccgtactgccagcgtacgtcgttcttgagtttctttcctccccagtccttcaggttgaagggcgggttagcgaggatgaaatcgaatttctcggtcttgtgcaggtcctcgaagaacgtgtcggcattatgatcgcccagatccgcgtcgatgccacggatcgcgaggttcatggtcgccattttccacgtggtcggattggactcctggccgtacacggagatgtcgttaatgttgccctgatggcgtttgacgaagtccgcggactgtacgaacatgccgccgctgccacagcacggatcgtacactcgcccgtggtagggttcgatgacttcgaccagcgtcttcacgacgcacgcgggtgtgtagaactcgccggcgttcttgccctccgcttcggcgaatttggccaggcaatattcgtaggtgcgtccgaggatgtcgcggctatcgcccttttcggccatcttcacgttggcgaacaggtccacgacttcgcccagacgtcgcttgtcgagctcctggcgtgcgaagttcttcggcaggatgcccttgagcttgttgttctcggcctcgatctggcgcatggcctcgtcgatggccttgccgatctcgggcgtgtgcgcggccgctgcgatggtcttccagcgggcgctctcgggaacgaagaagatgttctcactcgcgtattcgtcgcggtcctcctcgaagccctctccctcctcaacgagttcctggtatttctggtcgaacttgtcggagatgtacttcaggaagatgaggccgagcacgacgttcttgtattcggaagcgtcgatgttgccgcgcagcttgtcggcagcgctccagatctgttcctcgaagccgatctcggcggtattgtccttcttctttgccatgtcttgtattatcctcctgctcgtcctattcgctgatcttggtgtcggcccacagctcgcactgttccatgacggtcttcatggcgtcctcgacgccttcgggcggatacttgtatttgcgcagcaaacgtttgatggcacgccgcatgccggccctggcgctttccttcttctgccagtcgatcgtggcgttgctccgcatcgcatcggtcaactcgcgggctatcgagacgagctggtcgttgtcgtagaagtccttgaccgcctgcggctgggtgatcgcgtcgtagaacgccatctcctcgtcgctcaagccgagcttctgcgcgtcgtcgcggtccttcatgatctccttggccatgttgacgagctcttcgatgacctgcgcgttcgtgagcatgccgttgagatacgcgttcaacgtgttctggagcatctcgctgaacttctgggatttgaccacgctggtgcgcccgtacgcccgcactttctccttgatgaggcgtttcaggctctcgatcgcgatgttcttctccttcatgccggcgacctcctggaggaacgcctcatcgaacagggagatctccacgctgtccttctcgaacaggttgagcacgccgtccgcatgcacgctctgctggaggatctcgctcacctgcttgttgaactccgtgtacgtcatgccgctgcccccgccggagccacgtccggtcaggcgaaggacctgcacgcgcaatacggataggtaagccgcctcatgcgcgtcctcttcgcttaccatgcttttgcacaggctcagcgcctggttcatgagctggcattgcttgaggaacgattccgtgtcttcgtgccgttccagatcgagcagccagtcggttccctccgcgatggcgtcggcaagcgcctccctgctgttctggaagatgagtttgcggtagttgaagccgtacatgagatcacggcacacgtcgagcttttcgaggaatttcggataggcggtctcggcgatgttcatgtcgccgtaattgtgctggtcacggctgatatagtccttcatcgcccgcttgagcgcgcctgcgatgccgatgtaatccacgaccagaccgccctccttgcccttgcacacgcggttgacgcgggcgatggcctgcatgaggttatggcccttcatcggcttgaacacgtacatggtggacaggctgggcacgtcgaagccggtgagccacatgtccacgacgatggcgatcttgagggaatcggaatcgtccttgaacctgcgttccatctccttcttgtgcgtggtgccgccgcacacgtcgaaccattcctccggatcctggttcgacatggtcatcaccacgccgaccttgtctttccattcggggcgcagctccatgatcctgtagtagatcttcatcgcaatcggccggctgtacgccacgatcagggccttgccggccaggacgtcggcgcggttgttctcgtaatggtccacgatgtcgcggcacaatgcgtcgatggtttcaggagtgtcgaagatggcatcgaggccgccgaggtcatgcttggacttctccacgctcgcctcgtcggcctggtccgcgaactccttgtagaccgcgtcgatgcggcccagcgcgttctcgtcaagatggagcgagaccacacggctttcgtagtagaccggcttggtggactcgtcctcgacggactgggtcatgtcgtacacgtcaatgtagtcgccgaagatctcgcgggtgttgcggtcatccgtggagatcggcgttccggtgaaaccgatataggacgcgttcggcagtgccttgcgcacgatacgggccgcgccgaccgacacatgaccgtccgcgttgatccgttcggtcaggccgtactggccgcggtgagcctcgtccaccatcaccacaacgttgctccggtcgcacaacggctcgtcgccgtccgagaacttctgcatggtcgtgaagatgatgccgttcgccgcacgcccctcaagcagattcttgaggctctgtcgactctcggcctgaacggccttctgacgtaggaacttgacacagcggctgaactgtccaaaaagctggtcgtcgagatcgttgcggtcggtaatgaccacaatggtcgggctttcgagatgacgctgcagcagatgtgcgaagaacaccatcgaaagcgacttgccgcttccctgagtatgccagaacacaccgatcctgccatccccgttgacggcctcttccgctctgacgacggctttccgcaccgcgaaatactggtggtatgcggcgatgatcttcaccactttctcggaggaatcgttgaaacacacgaagttctggatgatgtcgagcagacgttccttcggaagcatgccgtcaatcatggtgctccacgtcgcggccttcgttccggaataatcgccatccaccgacttccaagccgtgtaacggtcctcatcagacgtaatcgtgccaaccctggtctgggtcatatcgctcatcacgcaaaacacgttgggcacgaacaggctcggtatctgcttcatgtactggcgcaattgcaggtaagcgtcagaagcgtccgtctcctcgcgcgacggggacttcaactcgaacaacaccaacggcatgccattcacgaaaatgatgatgtcgggacgtttctcggaatattccacgaacgtccactggttcacgacgtggaaatcgttgttctcagaatcgtcgaaatcaagcagccgaacgatgtcatcgcgctcttccttgccgtcaaagaagtgcacttcaactcctgattgcaggtagtcattgaatatctcgttgcattgctccagactgccgatctcgatgttctgaatcttccggatggcctcctcgacggctgcttccggcagatttctgttgattcgtcgcaacgcatccgggagaatatcaggaaggaatacgtcgcgatacgaatcgtcggtgcggcgaacatcgggcccgtacaggtgctcatatccaagtttttccgtcatatgatcgatgatcagattttcgtaccattcctcgttcaacggatccatggacgtgaagttgttcagagaacactccgagaccgtatgagattcggctttggaaacagccattgctcaccccacaaacatatggattctcacgcaaaccacctttcggttagtctatcaaccagcctatcgtttgggtgtaatcaacatggttgccgcagatttctagtggcggttgcaacacctgaagtttgagtggccttccgcggtcgcgttgttggttgttgaggttatcacacggcgttgagcctgaaaccacgacacaaaaccttcaggcgttgcaaccaccactagaatcctcctcacatcatgcccaactccaaacgcgaagttaaaacatgtgatgaatttgcgcgataaccggcatgacggatgaagacaatgcatctttaaccatgtgagagcgaagaaacgccatattcaaaaactgcatgccgaccgcattgaacagttgaacaaatacctgacgcaacctttatagcataccgcggaacaacaaaagtggtcccgccgttgaacggcaggaccacttcatgcattccacgcgcccgtgcgtcacgcagcgggcgcggtcggctcaccacggtgtcacgccttggcgacctccacacccagctcggcgccttccttcaccgcgaaggaggtggccagcgtctcatgggcgatcagatcgcggaaccgctcgacatcggccacattggcggacggcacggtcagcaccagggcgatgcgatcggcgatgtccaggtcggcggccttgcgggcgtcctgcacggcgcgaatcacatcgcgggcgtagccctcggcctccaggtcggcggtcagcacggtatcgagaatcacgaaaccgccggtgggcagagcggccgacacggaagcgtcggcctcggcggcgttctcctcctccacgcggttgattaactcgtattcgccggcctccagcgcaacctcgccgttcggcgtctcgacgaccggagcaccggtcgcggcatcaacgtgccaggcaccggtcttggacgccttgatggcgaactggacctgcttgccgaggcgcgggccggcggcgcgggcgttgaccttcagctcgtgcacgatcttcagcccctgcgaaccggcatcctccatcgtgcagaactcaatatcctttatattaagctctgacttgagaatttcgtcgtacgccttgacggcgtccacatcctcgaccacgacggtgagcttggcgagcggctggcgcacacggatctgggcggccttgcgcaacgacagagcgccggagacgatctcgcgcaccttctccatcgcgtccaccagtgccgggtcgtcgaccagcacacggccaagctcggtcgcctcaccggtcttctcgtccgcgacgtacggccaatcggccagatgcacggattcaccgccggtcaggccacgccacacggattcggactccatcggggcgagcggcgcgagaacgcgcatgaacacctcaagcacggtgtacagcgtgttgaacgcgttcgcgtcctccttccagaagcggtcgcgggtgttgcggatgtaccagttggtgagcacgtcgatgaagtcacttgccgcatcgcacgcgtcagaaatcgcgaactcgtcgagcgacttctctacacgctctacgagcctgcgggtgcgggccagcaggtaacggtccatctcgggcagacccgccacctcgtccgcgcgcagctgacgggcgtcgaagccggccccgccattggccgcgttcgcatacagcgtgaagaagtagtaggagctccacaccggcagcatgacctggcgcacggtgtcgcggatgccctcagcggtaacaatgaggttgccgccgcgcaggattggtgacgacataaggaaccagcgcatggcgtcggaaccgtacttgtcgaacacgccgttcacgtccgggtagttgcgcaggtgcttcgacatcttctggccgtcggaaccgagcacgatgccgtggcagatcacgttcttgaacgccgggcggtcgaacagcgcggtggccatcacgtgcagcaggtagaaccagccgcgggtctggccgatgtattcgacaatgtaatcggccgggaagtgctgttcgaacttctccttgttctcgaacgggtagtggaactgcgcgaacgacatggaaccggactcgaaccagcagtcgagcacatcggaaatacggtgcatgtgcgacttgccggtcgggtcgtccgggttgacgcgcgtgaggttgtcgatccacggacggtgcatgttgacgttgccgtccttgtcgcgcgggtagtcgccgaagtcggccttgagctcctccaacgaaccgtacacgtcgacgcgcgggtacttcgggtcatcgctcacccacaccgggatcggcgaaccccagaagcggttgcgggagatcgaccagtcgcgcgcgttggcgagccacttaccgaactgaccatccttgacattctcaggaatccagttgatctgctggttgagctccaacaggcgcggcttgatcttcgtcaccgacacgaaccaggagctcacaggcttgtagatcagcggcgtggcgcaacgccagcaatgcgggtaagagtgcacatagctcttctcctggaacaggatcgcgcgatgctcggccgggatctcggccagcgggccgtctccgttgcgcaggttgcgcaggatcggcttgttcgcgtcgaacacgtacatgccctcgtaatcggggcactgcgcggtgaagcggcagccggcgtcgagcacgtcagtgctcttgatgccgtgcgcgttcagcgtgttcatatcgtcctcaccatagggagcctggtgaaccaggccggtaccctcgacggtgtcgacgtagtccgcggtaaagatttggtagccttcgggccccggcacgttgccctcagactcggctttgtcgccagcgaagtacgggaacaccggccagtaacgccaaccggccatctcggagcccttgagctcgcgcacgacctcgtaatcctcgccgagctccttctcgtacttggagagcaggggcttgccgaagtagaacttcttgccggcgtacttgccctgcgtcgggcgcacctcgacatagtcgatgtcagcgccgacgacgattgcgaagttagtgggcacggtccacggcgtggtggtccagaagaccgcgtaggcgtcctcctcgtcgcgcagcttcacggccaccgacacggtggtgtcctgacgatcctgatacacgtcggcgtccatgcgcagctcgtgcgccgaaagcggcgtctgatccttcgggcagtacggcagcacgcggtagccctggtacgccagacccttctcgtacagctgcttgaacgcccacatcaccgactccatgtacgggatgttcagcgtcttgtacccgtgctcgaagtcgacccagcgggcctgacgatgcacgtaatcctgccattcgtgcgtgtacttcagcacggaggcgcggcaggcgtcattgaacttgtcgatgcccatcttctcgatctggtcgaccgagtcgatgccgagctccttctgcgcctccagctcggcgggcagaccgtgcgtgtcccagccgaacacgcggttgaccttgcggcccttcatggtctggtagcgcgggatcacgtccttcgcgtaaccggtcagcaggtggccgtagtgcggcaggccgttcgcgaacggcgggccgtcgaagaacacgaactcgttctggctatggtcgccggaagggttgcgttcaacggacttgttgaaggtgtcgtccttgtcccaatacttcaggacggtttcctccatgttggggaaactcgggttcggcgcgacgctggcggtctcgccgccctcgttcgccttgggatacacgtgggaattggtggtttcgctcaccattgctctcctcgatgtcgcattgcactggtcctacgggagctggctatagcgaaccattcacgggaagaacagggattgagacggccgttcgccacaccggcggcatatatgcgccggcgatgtcctcgcggccggaacccttgttccgcccggaacggccgtcatggccattcccgcctacgaggacgatgatcagcggcatgccctcaggctgccgaccgccaccgcggtaccacctcgcttgtcgctcacatccggccatcctaagacggcgaaaactcgcgaccgcttgtgttcggctgtgacgggccgatcccgtcggttctactcagcttcgtgccgtcgacgttcgatcgaccgtcatgaagcttttcttccgaagactccccgctgataacggatcatcgccttgacttcggtgcatatcctagcacggtgtgtggccgacggaaccggggtgtccgcgaacgccgtcggctcgcggccaggcaatcatgcgaggcccgaaatccgaccatcatgccggatgtacgccgacgctcaatcgcgcacgatgctgccgacgatccccgagacaatggacatgatgagagagccgagcaccgcccaccagaacccgtgcaccagcacgccaacaccgaacagactgattgccaaccatgaggcgagccgcatgaacagccagttgatgaccagatacagcagcccgaacgtgagaatcgaaaacggcagcgcgatcagctgcgtcaccggcttgatcgaggcgttgatcagcgccatgaacagcgcgaacactgcgattcccaaaatcggaggctgccccaccgcggtcatgccgggcagaagcaccaccatcaccgcggccgcaaccgtcagcaccagccatcgcatcagaaaatccttcatggcgcccatcttatgccatccaagccgtcaccgatcagttgcgatgtgccggttcggtgcattcatcatatgtcgggcacgatcatcgagaacgattgcgcttaagggcacaatcgccacctaaagacccagaccaccctcagtcggctccgccgacagctcccgccagcaggagccagcatgcaactccaatacgacgtcagggcggaaatcgtcgattacgttccgcggattcttcggctaccatgccaacaggaggacgacgatgactacaaaggaaacggcggcggcgaccacgacgaagcaggcggccgcccggcaacgggcgttcgcgcaactggacgcgaccttccgctcaggagtcacccggccactgcgctggcgaaaggcgcaactcgacgcgatggcccgaatgctgaggcagaatgccaccgtcatcgcccgtgcggtacgcgccgacctgggcaaacccgccgcggagaccgcgctgatggaaatcgggctggtgctcgatgagattcgcttcatcaagccacgcctcggcaggtgggcggcgcggcatcccaagccgatgcattacctgctgcagcccgcagtcggctggacagtcgccgagccgaaaggcgtggcgctcatcatctcgccgtggaactatccggtgctgctcagtttcgagcctatggcggacgcgatcgccgcaggcaattgcgtgtgcatgaaaccatcggagctgtctccgcacaccagcggcgtgatggcggacctcatcgcacggtacatggacccgcaggcgttccgcgtggttcagggaggaccgcaggagacgacaaagctgctggagcagccgttcaatcacatcttctacaccggcggaggaaaagtcggttcaatagtcatggccgccgccgcgaagcatctcacaccggtcactttggagctcggaggcaagtcgccggtgttcgtcgaccgtaccgcgaacctcgacgtcgccgcgcggcgcatcgcctgggggcggttcatcaacgccgggcagacctgcgtggcacccgactatgtgctcgcaacgtccgacgtcatcgagccgctggccggaaagatcgccgaggccgtcacgcggttcttcggctcagacccgcaacattccgacagtttcggacgcatcatcaacgcccggcatttcgaccggctgactgcgctgctgcccgatccgaagagccccgccaccggacgcacggtatgcggtggcaataccagacgcgatgacctctacatcgcaccgaccgtgctattgggcgtcaaacccgatgcgccggtgatgcaggaggagatattcggcccgattctgcccattttggaagtcgccgacgcgaaagccgcagtggaattcatcaacgcccggccacgcccgctggcggcctacgcgttcacgggcagcaagagggtacggcggatgttcgagcgcgaagtcagttgcggagcgctgggattcaacctgccgcttggccatctgatctccagtcggctgccgttcggcggcgtgggagcttcgggcatgggctcatatcacggcaaggccgggttcctggagttcagtcatgtcaagaccgtggtcggcaagcccgcggtgccggatacgctttcgctggtgtatccgccgtatgacggcttgaagaagatactgatttcggcggtcagccatacgccgagagtgcggtagcgggacacggcgcacctcccgctggcgggagatgacgcgcagcgccggtgggtggtgaccatccccagtcggctcggccgacagccccgccagcgggggcgttacagtgctccagtcgtctccgccgacagcccttcgggccctgcaattatggacgggctaggcatgactgttccgctggctcgctgtcgttcgctcttcgcctacaaaccgcaccgctgtttgcttgacggctcagcccgtcaacgggggcataatgtaaaagcccctcgcgatgaggggctttatcgatgagtaggacttgttacttggcttcgttggtggtgagcatggccttggtgacctgttggtagagatcctcgtagccgccgggcgtggaggcgggcagcacgacggtcttggtgttgttcgactcggacagcgagcgcatcacatcaaggtactggttgaacagcacgacgttgttgacgtcgttgatgtccatgcccacggcctgcaggctcttgatctggtcgacgatgccgtttgcgatctcacgacggtagttggcctggccctcaccctggagtcgggtcttctcggcgtccgcagcggcctgcgtctcgatctggatgcgctgcgcctcggcacgctggcgggtggcctccttctcacgctgcgcggcgttgatggagtccatcgcgctcttgacctgcgggctcgggtcaatggcggtgatcagcgtcttgacgacggtgaagccgaagcgcgccatctcggcgccgaccgtcttctgcacgtcgaaggcgacgtcgtccttgcgggcgaaggcgtcatcgaggctgagcgccgggatcgcggaacgcagcgcgtcctccatgtagctcctgagctgtccggcgggatcgcgcagctcatagtatgcggtggcgacgttctcaggattgacacggaactgcgtcgaagcgacgaccgtgacgaacacgttgtcgagcgtcttggtttccagctgcacgttcagctgggagactcgcatgttcgtcttcgtcgagatgcggtcgacgaacgggatcttggcgtggatgccggcgaactggaccttattgtatttgccgaaccgttcgatgatgtatgcctgctgttgcggcacgatgaaaatcgaggcgcacagcacggcgaggacgatgacgacgatgacgcccaatatgatcagaacatccatcattcccatcagaacacccatcattcctccttgcctggtgttgccgcaccctacctcgggcgcgatgtctattccatcctatctgaaaacgacgggctttcagtgaaagctcacatagaattcaagagttgttcgccgtgtggcccttcttcgtctcaccgtacgggacggcggcatgcccacgtctactccccgtatgcgccggctatggcccggtcaaggtcggccatcaggtctcccgcgtcctcaagaccgatggacagacgaatcagatcgtcgctcacaccagcggccttgcgatacgattccggcacctcgcggtgagtgatgttcgcggggtcgacgatcagcgaccttgcgtcgccgatatttggcacgtatgagaacagcttcacgccgtcgaggatgcgacgcacacggtccgcgccgccttccaccttgaacgagaggatctggccgacgcctcgggggaagtatttcccggcgagcgcatgatacggcgagtccggcaaccctgaataattcaccgacacgacatgcggcgtgtgttcgaggtgcccggcgatggccgtcgccgtttcgacctggcgggcgacccgctgcggcagcgtctccagtccgatcagctgcaggtatgcgttgaacgggctttgcacggcaccgaacgtgcgcaggtatttgacgcggatgcgcctgatgaacgcttcggagccaaacgccccggagaagctgcgccggttgccgtcgatgtcggcgatgacctgctcaggccgcgtgaattgcaggaaacggcggttcgcccagtcgaaccgtccggcgtcgacgattacgccgccgatggcgttgccatgcccggtgatgcccttggtggtcgaatgcacaacgatgtcggcgccgaattcgatcgggcgcagcaggtacggcgtcggcacggtgttgtcgagaatcagcgccagcccgtgccggtgcgccagatcggccagcggacggatatcggtgatggcggtgttcgggttggcgaccgtctcggcgaagatggcacgggtcgcgggaccgatcagagactcgatctcatgcaggtcgttgatgtccttgacgaaatcagcgtggatgccgaactgcggcaggaagtcgccgagcgcatcgactgacgccccatacaggttcgtcggcgcgatgatgcggccaccgccctcccccgcgcacatcagcgcgtatgacaccgcggccatgcccgacgacaccgccaccgcgctgacgccaccctccagggcggcgagccggcgttcgagcgcatcgacggtcggattggcgactctggaatactcgaacccggatatctcaccggcggccagatcacggccacgagcggcgttctccaaatcgaaggcggcggaggcgtagatgggcacgctgaccgcatcgtcgttgcggttcgcattatacccgccatgaaccgcaagcgtgctgaaatcagtcatttccaaatccctttcatccgcatgaccgccaaaacaacgaacaccgaccgccatattccttcaagacacgacagtgcgggcgtcatcgccatgaacgtcaacgcccgcacggcccgcaccgcatgataggcacggtacgcgaccctatgcggccacttccgtcgtcagccggtcgagcacctgaccgcttacgccgtcgatgcccagcgcctcgaacgccttgtcgaagccctgccccaaatcctcgatcaggtcagacacgtcctcgatgcccaccgacagacgcaccagctcgtcggtgatgcccaccttgagacgctcctcgcgaggcagctcgaaatgcgtcatgcggcatggcagctcggcgaggctttccaccgcgcccagactgacggcgagatggaacacgtgcaggttgtcgagcacgatggacgggtcgacccccggcaccacttcgaaggacagcacgccgccgaaccccttgagtccattctcggcgagcagacggttgcggtcgccatacacgcccgggtaatgcacggcccgaacgagcggatgcgccagcaggtattccgccacggcctgcgcgttgcgctgctgacactccatacgcagcgccaacgtctggatgccacggcgcacgtcgttgcattcggtcggggcgagcacgccgccgaaccggttctgcgcgaagtagatgccattgccgacctcatcgtccaacaccaccacaaggccggcgttcacctcggaatggcctgccaggtatttggtggccgaatggatgacgatatccgcgcccaaatcgagcggctgctgcaggtacggggtgacgaacgtgttgtcgacgatggacagcgcgccgtatcggtgcgcgatggccgagatgcggttgacgttgctgatctgcagcagcgggttggtcagcgtctcgaaatatacggcgctggccgcgcggccgcctctgtcgcgcccgctgatcgcggcgtcgagcgcctcgtagtcagcggtgtcgacgctgtcgaactccagcccgcgctcggcgaagtactcgttgaacagcgaatacgtgccgccgtagatgttcttgccgaccacgatgcgatccccgggtttgaagatggacagcaccgcgtgaatcgcggcgagtccggacgcgaacgcgaagccgcgagtcccgtgctccagctgggcgatctgcttttccagaaagtcgcgggtcgggttgccgctgcgcgcataatcccagcggggcatggcgttgaccgattcgacagcgtatgtggatgagttgtagatgggcgggttgacggctccggtgttgttgtcgttgaccggcaatccgtggaccagctgagtgttgaacctcgtcatgagcaccccctgcggtttttttggcgggtttcccgatgaaccccgcgtgacccttatgaaggtagtcagcggccggcggccccgcaacccggacggcatacacattatttataggatgctcaaaacccttgcaaacactggattttcacgacttgcacggcatctttgacgaccggcaagagccatttgcgacacgctcggaatgttctggcggcaaccaaggcgcgactaagtgcgacatggcttcgcgcagaaaccgacgctacgacccatcggccatcgtgatgttcgtcacatccgggccctgtagggcatttggtctcaccctggcatcggaaccgggcgatatgctggagtgacgccggcgggattcacgcgccggagggacccaagcaaaggagctcgcccatgaccaccgtagccatcgtcggatgcactcacgcgggaacgttcgccgccacatccatcctcaagcagcatcccgactggacggtccacatattcgaacgcaacgactcgctgtcgttcctttcctgcggcatcgcgctgtgggtcggcgaccacgtgtccgatccgaagcgcatgttctattcgtcgccgaaggccctcgccgaagccggcgccacgatgcacatgcgccacgacgtgctcgatgtggatgtcgccggcaaggtgttgcgcgcccgtgacatgagcaccggggaagtcggcgaataccgatacgacaagctggtgatcaccaccggttccgcgcccgtggtgccgccgatcgacgggctggacgaggcgctcgaatcgggacgcgtgctgctgtgcaagaactgggaccatgcgatggcgatcaaggagcgcgcgggcagcgcgaaatcggccgtcgtgatcggcgcggggtacatcggcgcggagatcgccgagcagttcagcgaaatcggcgtgaagaccacgctggtggatgcgctggaccgcgtgctggcgaacaatttcgacgcgaccatcaccgatgacgtggagcaggcgttcgacgagcatggcgtgaccctggcgctcggccagaaggtgacggcgttccggccggcggccggcagcgacgggatcgagggctccggcgtgaccgtggtcaccgagaagggcgagtacacggccgatgtggcgatcctgggcgccggattccgcccgaacaccgcgttgttcgcggatcagctgcgtatgctgaagaacggggcgatcgtcatcgacgactacatgcgcgcctcattgccggacaacacggtgctcgacgacgtgttcgcggcgggcgacagcgccacggtccgatacaacccgaccggcgcggacgattacatcccgctcgccaccaatgcggtgcggcaggggctgctcatcggcgagaacatcgtcgccgcgacgaagcggtatcccggcacgcaggccaccagcgcagtgcagttgtacgatctggcgatgtccgccacgggactcaccgccggcggcgcgaaacgccgaggcatcgccgcgaaatcgacgacgatcacgcaggattaccgccccgatttcatgctcaccaccacgccggtgacgaccacgctggtgtggagcccggtcacccggcgcatcctgggtgcgcagttcctgtcgaagcatgacatctcgcaggcggcgaacgtcgtgtccgtggccattcaggcggggttcacgatcgatcagctcgccggcgccgacctgttcttccagccgaacttcagccaaccgatcaatttcgtcggagccgtggccattcaggcagtggccgaaagctgaccccaatcgttgactcgcgctcaacgcggacgcgaaagccccgatcattgggaaacggccattccggttctcgtatccgcggctaatgcgagcacacgattcgcatcagccgcgtgacctgttcggcggtgcgggccacgttcgcacgggcgtcgcgcagcagctcatcgaggctcgcggcacccggcgcggcaccgaagaccgcatcgatgccgcgcccgtgcagacactcgatgccgtcgccgacgtggccggcgatggcaatcaccggtttgccgtgccgcttcgccacggaggcgaccccgaccggcgtcttgccgaacatggtctgcgcgtcaatcgaaccttcgccggtgaacacgatgtccgcccattgtgcggcggcatccagcccggactgctcgatcaccaagtcgatgcccgggcgaaaatcggcgtgcagcacggcgagcagcgccatgccgatgccgcccgccgccccggctccgggatgatcggcgatgggcgtgcgggtacggtggtcaggacgggaacggtggccaggagacgatgattcagccacggccgcttcgactttcccgccatcgccattccgttcggcgggcacctgttcagcgagcgcacgttcgatgaccgacgagacgtgccgcagggcgccgtccaacagcgtcacgtcttcgcgactcgcgcccttctgcgggccgaacaccgcgctggcgccctcggggccggtcagcggattggtcacatcgcaggcggcgatgacatgcacgtcgccaagccgtctgtccagaccgctcaggtcaacgcgctccacttcggcgagcgccgccccgcccggccgcacgtcacgcccgtcatggtcaagcagccgcacccccaacgcctgcaggagaccgcagcccgcgtcgttggtggcgctgccgccgagcccgacgatgatcgtctcggcgccggcgtcgagcgcggcccggatcagttcgcccgtgccgtatgacgtcgtggccttcgggtcgcgttcggatgggcgcagcagcgccagtccgctggcggcggcggtctccacgaccgcggtgcggccgtcgccgagcagcgcgaacccggcctgcaccgggcgcccgaggggatcgtgcgcgctggccgtcagcatcgtgccgccggtggcgtcggccagcgcccgcgcggttccctctcccccgtcagccatgggcaggcatcgtatttcggcgccggggtcaccgcggcggatgccttcggccatggcccgtgccgcctcggcggcggtcaggctctccttgaaggaatcaggcgcacataggtatcgcatcgccggatcacgcctgctattcggtgcgcagcgcggtggccgggtcctgcttggcggccttgcgcgacggaatcaggccgccgataagggtgagcaccatgctgagcaccaccaggatcaccgctccggccaccggcagcgcggcgttcacgtcgttggtgccgatgaaatggtgcagcacctggttgcccggtatgagcagcagcagcgtcacgcctatgccgatcaggccggcgcacaggccgatgagtccggtctccgcgttgaacacctgcgacacattgcgcttcgaggcgcccatcgcgcgcaggatgccgatctccttggtgcgttccagcaccgagatgtacgtgatgatgccgatcatgatcgacgacaccaccagcgacacggacacgaacgcgatcagcacataggagatcacgttgatgatcgtcgtcaccgagctcatcatcaggccgacgtaatcggtgtagacgatcttgtcggccttgggcacggtcttgttgtagtcggtgatggccttggacacgtggtccttgtcctcgaagctgtcggtgtagatgttgatcgtcgagggcacgtcccggctcaccacgccgaacgcggcgaggttgtcgtcatacgtgccggtcgagacgtactggtcgtagatcttgaccagcacgtcctgcgaggcggtggcgatgtactggtcgaagctgtcggcgagctgctgctcgctcatcgccgccgtccactgcccgcccgcggctgactgcccggcctgcccgggctgagccgactgcgctgactgcgactgcatcatggccttggccatgttcgccttgtcgctcacgccgagcgaggccacataggtcttggcatcagcggccttcgccgcgtcgtccgacggcgagaacgccaggccgttgagcacgtcgcgggtcttgtccttctcctggtcggtgacgatggcgctggagttcacatggtcgatcagctcgtcggtcagtgcgcgggtgtagccgattccggtggccagcggcgtggcggaggcgtccttgatcggcttgaccacgcccacgatcttcagctgctccgccgagtcgaagcgctctgcgatggcgtccgcgtcgtcgccgatgtacgtgtagtcgccgttcgcgtccttcacatactggtctgcggcgggtatcatggccagcttctgccccatcgccgtcgcgtagtcgatcttgccggtgggtgtcttgaccgtctcgccgtcgttgagcttgttcatcatgtcggtgtagtcgctggccttgagcaggcccagctcatacagcgtggtgagcggtaccttgttgtcgtcgtcaagcacgagcacgacctggtccttgccggtcggccatgcgcccttgaccacgcggtagttgtcggtgatgaccttgctgatgagctgatcgtccttcgcccccggcatgatttcatggaacgagttgggcgacgcgctcgtgtcggtcttgccggtcagcatcgtcatctgcatgctcgtcatgtcggacatgctcgacgactggcccatcgagctcatccgcgcagcgttcgatgtcgaatcggacttggcaccgatggtgacgccgttcgcggtgaccagcgtgccgtcgggatcgtggctgaacacggagaacttcacgtcgtacgtgtattggatgccggtttcgccgacatattggcgaacctcgctgttggggtcgtccagatacttcttgaaatcggtgaggttgttcttcgtgatgctgctcgtcaggctggaggtctgcttgatgctgcggtcgtccgggtaaatgccgtcgttcttcgccgatttgcctccggtctccttgccgcccgcctgggcgcccatgatgctggtcatgtcgaaggtctgcgagtcgatggtgatcggataggcggtcatcgtgtcgcgctggatgctgtcgatgtacgcgttaacgccggtggaaaccgacaggatcagggcgatgccgatgatgccgatagacccggcaaacgaggtgagcagcgtacggcccttcttggtcctcagattgttgaagctcagcgcgatggacgtggcgagcgacatcgaggccttgcccagcctcttgtgtacgggtgcctcggacgcgccctcctcgacctcgtacgggtcggaatcgctgcggatcacgccgtcgcgcagctggacggttctggtggcgtactgctcggcgagctcgggattatgtgtgaccatgaccaccagacggtccttcgccacctccttgagcaggttcatgatctgcacggacgtgtcggagtcgagcgctccggtcggctcgtcggccagcacgatgtccgggtcgttgaccagggcgcgggcgatggcgacgcgctgcatctgcccgccggacagctggttcggcttcttgttgatgtggtcgcccagcccgacctgttcgagggccttgcgggcacgctcccgccgttcggtacgggatacgccggagatcgtcagcgcgagctccacgttcgacagaatcgtctggtgcggaatcaggttgtagctttggaacacgaagccgatcgtgtggttgcggtacgaattccagtcacggtccttgtaccgtttggtggagaccccgttgatgatcaggtcgccgctgtcgtaccggtccaggccgccgatgatgttgagcagcgtggtcttgccggaacccgacggacccaatatcgccacgaattcgctgtcgcgcaggttcaggctgacgtcatccaacgccttctgtacgaaatcgccggtcttgtattgcttggaaatcgacttgatctgcagcacgatgctccccttattacccatgggtggttcgtcgtatgtctccatgatttgcgatatgacaccactgtatccgacccgttcccccagcgcctcgtgattcactgcaagcattgggaataaaaccgacaacaaacgactttgcgtcgctttgacatgacggaaccgtgacggccctcgcgcgtcaagtgtgtgtatcaagcatgctttgcgtttttttagcgcccccctcagcagttttcccatacagtcgaaaccatgacaggactcactacatctgaagtcgaagaacgccgcgcgcgaggcgagggcgaaaccggggcgcgaagcgtcaccaaatcgacaggcgcgatactgcgcgagaacatctgcacgctgttcaacgcactgaacttcgctatagcgatactgctgttcgcggtcggcgcgtactccaacatgctgttcatcgcgatcatcatcctcaacatcgtcatcggcatcgtgcaggaattcaaggcgaagaaactcgtcgacgagctgacgatcctcaaccagccgcacgcggtggtgctgcgcgacggcaaggagacgaccatcgaggccggcgacatcgtcaaggacgatgtcatggtgctggattccggcaagcagatctgcaacgacgccgtggtcatcgacggccgtctggaagtcaacgaatcgctgctgaccggcgaaagcgactccatcgacaagaccgccggcagcgagctgtattccggcagttcggtgatttccggccgcgcgtacgcccgtgtgacgcacgtcggcgacgagaactacacgaattcgctgatcaacgaggtgcgccaggagaagcgcgtgcactccgagctgctggattcgatgcgcaaggtcacccggttcaccagcttcctgatcatcccgctgggcgtgctgctgttcgtcgaggcgatgttcctgcggcactccggcacgtacgacgccgtggtgtcgtccgccgcggcgctgctcggcatgctgccgaagggactggtgctgctgatctccgtgtcgctggccaccggcgtgatccgcctcgcgaaggccaagatcctcgtgcagaacatctattcgctggagacgctggcgcatgtggacgtgctgtgcctcgacaagaccggcacgctgacggacggcaacatgagcgtggaccggatcgtgccgctcggcgagcgcggtgccgccgaggattccgacgcgctgctgcgcgcctacctggacgccagcgaggacaacaacgtgaccatcgcggcgctgcgcgcccatttcggtgccgacggctccaccgccgatgccgggcagcccgcggcgcccgccggcgacggccgtttcgccgcgcaggccatcatcccgttctcgtcgaagcgcaaatggggcgccatcacgatgcgcgcagcggctggtgcggcagacgcgcctcgccacgcgcaggagggcgagtcggccgcggcggcgaccggaaccgtgttcctgggcgccccggagcgcatccttggcgcgaacctgcccgatgaggcggccgcgctgatgggtcagggactgcgtctgatcgccgtcggatacctgcccggcgcgtggacggacgaggagcgtctgccggatgcgctgcagccgatgttcctgatcgcgctgcgcgacaacatccgcccgcgggccaaggagacgctggcgtacttccgcgaccagggcgtcgacgtgaaggtcatctccggcgaccatcccgacaccgtcgccgccgtcgcccggcaggccggcctggagcgttggcgtgacgtcatcgacatgacctcggtgccggcggacgccccggattccacgttcaacgacgtcgccggccgatacacggtgttctctcgcgtcacccccaagcagaagcgccagctggtgcaggcgatgcagcgggccgggcatcaggtcgcgatgaccggcgacggcgtgaatgacctgctcgccctgcgcgaggccgactgctcgatcgccatcgcctccgggtcggacgccgcgcgccagatctcgcaggtcgtgctgctcgactccgatttcacctacctgccgcaggtggtgctggagggccgcaaggtcgtcaacaacgtgacccgcacggccgccgtgttcttcatcaagacgatctactcggtgctggtgtcgttcttctgcctggctttgaacgtcccgttcccgttcattccgatccagatcacgcttgtcgatgcctgcatcgaggcgtggccgtcgttcctgacgatattcgaatcggacacgcgacgcatccgcggccggttcctgcccactgcgctcggcaaggcggcgccgttcgcgatcgtcgtcaccggcatgatcatcgcattcagcctcatcgctccgttcggcgagacgcagaaccgcacggtcatgttcgcgctgctggtcgccgcgtcgatggtcgccgtgatcaagagctgcgtgccgttcacgaagatccgcgtgttcgtctgcgtgacgatggtgctgggtgccccgttcgcgctgctcatcctgccgcacctgttcgaagtggttgcgatgaccggcccgatgtgggcatggttcgcggtggcgttcgtggtgatgatggccgtcaccgccgcgatcatcgcggcgcagcgggcatggctgcggtcacggcgctgaccggcgagcgattccccgtgataccggcgtggattggcatcagatgcgcctggactttcggcgggagcggcagcagtcgtgttgtccacagggacgatagacagtatgcggtttcattgcttctccgtgaatccccgcaggggctgtgtcgccgaacggccgcagcggcggtctggcagcggcagccgagatcggccggatcccgtaataatgcagcttgcgcagcacgtgtgcataggcctcgtccagcgtcctgcgctgctcctcgatggcggcgcgccggtcctcaagcagcgcgacgatgtcgtcgatatgctccggctcgtcggcctcgaacgcgaagaaccgcttgaggtcctcgatggacatgtcggcgacctcgcggattgtgcatcgttccatgctcgacatcgtagccgcgaggatgacacgccggcgcccttgcgctcaagccaacttgaagcgtgacaatggagacatcggaccgatcgacgacacctggaggcacccatgttcgaacccaccggcacctacgcgcccgccacgacgcgctacgacaccatgctgtacaagcgctgcggcgccagcggcctgaagctcccggccatatcgctgggcttctggcacaacttcggcgacatcacgccctacgaccagatgaaggccctggtgctcaccgcattcgaccacggcatcacgcacttcgacctagccaacaactacggccccgaacccggcgccgcggagaagaacgcgggacggctgatccggcaatacctcgccgcccaccgcgacgaactggtcatcagcaccaaggccggctacgagatgtggtcgggcccgtacggcgattggggcagccgcaaatacctgctcgcctcactcgaccagagcctggaacgcctgggactcgactacgtcgacatcttctaccatcaccgtccggaccccgagacccctctggaggaaacgatgggcgcgctcgcccaggccgtcgccagcggcaaggcgctctatgtgggcctgtcgaactacgacgggccacagctggagcgggcggcgacgatcctcgatgaactgcacgtgccgttcatcatcaaccagaacaaatacaacatcttcgaccgcaccgtcgagcgcaacgggctcaaggacaccgccaagcacctgggcaagggtctcatcacgttctgcccgctcgcgcagggtctgctgaccgaccggtatctcaacggcatccccgcggattcgcgcgtggcgcacgatccgcgcttcctgcacgccgacgacgtgacgcgcgtccacggccagatcatggccctgaacgagatcgccaagcagcgcgggcagacgctcgccgagatgtcgctcgcctggctgctgcacgacgacgccgtgaccagcgtgctcgccggcgcatccaagccgcagcagatcatcgacaacatcggggcgctgaagaacacggacttcagcgacgaggagctgaaagccatcgatgagatctccatgcagtgacgaataccgctggaagtcgcatccggaaacggctcccagcgtaccggaaggaaacgtaccggcatatattcatgccaatcacagcacagcttccaggatggtggagtgatatggaggttgtcggcaagagccggcgaggtcactcaaggtaaccccacaattgaaacccccttctctcttctccttctcacccggcccttttgggccgggtttccttttcttcggagcctgcgacaccggaaagccgacgacggcgaatcgtatcgcaatggtgatgtacagtagtgagttcgccacgaccattacgaggcggcttcatgccgccgggaggagacaccgatgctgcccgacgggacactgcccgacgattatgtcgtactggatctggaaaccaccggtgtcagctggtatcgggacaccatcatcgagttcggagcggtgaaggtcgtcgaccgcaagcccgtcgacacctatcagcagttggtcaatccgatgcgcaacctcaatccgttcatcacgcagctgaccggcatcacgccggacatgctcgaaccggcaccgacgctggacaccgtgctgcccgacttcctgcgctggtgcggcgacgacgcgatgatcgggcacaacatcatgcagttcgacatcaagttcatcgacctggcggcgcagcgcatcctgcaccatgcggtgccgaaccgcatcatcgatacgttgcagatgagccggagcatgtacccgcagtacaaccgacaccggctggtcgacctgatccagcgtttcgacatcgccgacgtcgaggagcaccgcgcgctgtcggacgccgagcagacacagatgtgcttcgaatacatgcgcgacgagcagcgtcgcagagactgctgagagcggagagagctgactgatggcattgggcgttggcgcgcggtctctgacgccgcccgccaacgctcaatgccatcggcgcagttttccgcttccgtcagcgttgattcagggggatgtaggcgcgctccacctcgccggtgtacacctgacgcggacgaccgatcttcgtgttcgggtcggcgagcatctcgcggtactgggcgatccatccggggatgcggccaagcgcgaacagcgtggtgaacatcgccggatcgaaaccgatcgcgcggtatatcaggccggtgtagaagtcgacattcggatacaagtgacgtgacacgaaatactcgtcgttgagcgcgatgtcctcaagctcaaccgcgacgtcgaacagggcgcgctcgtcggcgggaagcttgcgggtgtcctcacgcgcgatgatcttctccagatacaggcgcgcgatcgcggcacgcggatcatacgacttgtacacgcgatgccccaggcctgagatgcgatgcccctcggccttcgcgtcctccacgaactggcggacggacttgccggagtcgcggatcgccttcaactgacgcaacacggcctcgttcgcgccgccatgcaacggcccggacagcgcgttgatgccggcggagatcgccgcatacaggttcgcgtgggcggagccggcgatgcggaccaccgacgtggagcaattctgctcatggtcggcatggatgatgagcagacggccgagcgcgtgcacgtacagcgggtcggaatcgaaccgctcgtatggcacggcgaagcacatgcgcaggaaatcgtcgacgtagccgcgggcgaggtccgggtagagcatcggctcatcgcggcggcgccggaaaatgtagctgaccaccgtgcgcgccttcgccatgatgatcttcgcggcctcatccagctggtcggagtcggtgatgtcggtggtgtcggggtagaacgccgcaagcgcgttcaccgccgcagcgagcacgctcatcggatgggcggcacgggggaacgagcccatgaacgtgcggaaatcctcgcccaccatggtcttgtggttgatgtcgctgcaaaaccggtcgtattccgcctgcgtcggcaggtcgccgtgtcgcagcagccacgcgacctcaaggaaatcggaatgctcgcacagctgctcgatggggtagccccggtagcgcaggatcgaccgattgccgtctatgaacgtgatcttcgattcgcactgcgccgtggtcaggaagccgggatcaagcgtgacccagccgtcattgcgcagcttggagaccacgatgccatccgggccggccgaagccttgacgaccggcagcgtgtactgattcgaatccacatgaagttcagctgtcgccatgcacgctccttaatcccttgattgagtcgttcgaattgtcaagtcgtcgaaattatcgaattcgtcgtcccggtgccttgtattggacacactatattgcgtgcatgtttccaccaaaaacgccgctccagcacgtggacatcatcacatgccaaagcggcgacggcatcgcccgatacaggccgtgggcgatggacgaccggttgccggtcagtcgcgggtggtcaggatgaccggaccgttctcggtgatggcgatcgtgtgctcgctgtgggcgccacgcgacccgtcctcggaacgcagcgtccagccgtccttggggtcctggtagatctcgtcggtggtcttgaggaaccacggttcgatggcgatgaccagacccgggcgcaggcggtagccgtggccggccttgccgtcgttggcgacgtgcgggtctccgtgcatgatgtggccgacgccatggccgccgaattccaagttgatcgggtagccgtacgaacgggcgatgtcgccgatggtggaggacacgtcgcccagacggttgcccggacgggccgcgtcaatgccggcggcgagcgcctcctcggtgcacttgatgagcttgaggtcgctcgggtcggggtcgttgccgaccacgaagctgatggcggagtcgccgacccagccgttgacgctgatggccagatcaaggctgacgaggtccccgtccttgaggttgtagtcgaacgggatgccatgcagcactgcgtcgttgaccgacgtgcagatgtagtgtgcgaacgggccggtgccgaagtccggcgcataatccacgtagcacgattcggcgcccttgcggtcgacgatcttcttgtgcacgtactcgtcgatctccagcaggttggtgccgaccttcgtcatggccttgagttccttgagaatctcgccgacgaaacgaccggccggcttcatctcctcgatttccttagcggttttcagttcgatcatgcaacccagcctactgtgcgggggttacttacgcctcggacggccgaacttgaacgcgcggaccatcgaggaaacacccatgacgatcagcgcacatccgcagaaaatcaccaggaacagcatcgacgagaccggcgagaccagtacgacgagaccggcgataatcgagatgatcgcgtacagcaccgcccagccggagctcggcaggcgccatgattcggcgagcgccatcacgccttccatcatccagccgaggccaaccaccatcgtgatgaacactgcgagcgcctgtccggacagggccgcgttcttcagcatgagtacgccgccgaccgacagcattatgccgatgaggatgtccaggatgcgccatccggccggcagtcccaatgtgacgatggcgctgacgatgcggatcacgccggagaccacgaagtagatgccgagtgcgacggccgcgacgccgagcgtcttgccgggccagatcagcagcgcgacgccgagcacgatcgccgcgacgccgatgatgccgtacaggccgcggatcgcgttcttcgccttctgcggcagcatctcctcgatcagccggaacgggctgaagtcctcccagccgccctgcccttgctgctggccgggctgctgttggccgaacggcggctggtaggcgtagggctggccgtacgggcggcctggctggtcggatgcggtgcctggctgcgtctggtattggccggatgcggtgccgtcctgcggcgctcccccgtacgggtattgctggcccgcaggctggccttgaggcgcgtaggctccgtattccggctctccggcacggccggtctgttcgttcccgccgggctgtccgccgtcaccgcgcccgttgtcgccatgtccgtcgctgtgcgggaaaggcccgccatcgtatgtgctcatcatgactccttcaccgttcatgcggcctgccgtcaaccgtgtgcgggcatccgaagcgggccacttcgatatcgtcaccgtcaccaccatattttagacaagttgtccaattcatgccatcaacacaacccgccgttccgtccaataccttgcgtgtcgttcgctatgggaaaagacgggccgtggaaggtcagaaggaacgtcaccgaacccggatagtatgagatcatgaccacagatttgacgtccggcctcgatacggccgctttttcctctgttatcaaaccatccgacgatctgttccgtttcgtcaacggcccttggatcgacacgtaccggctgcctgacgacaaggcgcgctacggttccttcgacaagctcgcggaagacgccgagagccagatccgcgacatcctggaggacgaggactgccccgcagccaagtcgcaggcgctgtaccgctcgttcatggacaccgacgccatcgaggcggccggtgccacgccgatcaggcccgccctcgacgccatcgaccacgccgccgacaaggcggcgctgacccgcaccatcggagccctcaagcccatcgacatggggccggacgtcttcgacatcgccgtattcggcgaccccaagaaccccgacacgaacgtcgtgcacctcgaacagtccggcatcggcctgcccgacgaagcctactaccgcgaggaccactacaccccgatccgcgaagcctacgtcgacatggtcgccaagcagctgcgtctggccggctacggcgacgaggagaccacccgcgcacaggcgggccgcttcctcgatgtcgagacccgcatcgccgcgaaccactgggacaacgtcgccacgcgcgactcgcagaagacctacaacccgaccgatttcgccacgctgagcgacgaattggcccacttcgacatcgcggcgtgggccgacgcctggcagggcgcctacgacgccacgccggcggcgaagacccagccggtggacctgacggccgcgctgcagcacaccatcgtccacgagcccagcttcctcaagggcttcgacgccttctggaacaacgctgaccttgacgacctcaagctgtgggctcgcgtgcacgtcatcatcggcaccgcgagcctgctcagccacgactacgacgccgccaacttcgacttctacggcaaagtgctgtccggcaccacccagcagcgcgaccgctggcgtcgcggtgtctccctggtcaacggcgtttgcggcgaggacgtcggccgcgaatacgtcaagcgtcacttccccgaaagctccaagcagcgtatggggcagctggtcggcaacctgatcgacgcctaccgcgtgtcgatcaccaacagcgactggctcggcgaggagaccaaggccaaggcgctggagaagctgtcgaagttcacgccgatgatcggctacaccgagcgttggcgcgactacaccgcgttcgacgtgcatgccgacgccggcctggtggcgaacatgcaggccgcggcgctctacgagtggggcttccagctgtccaaggccggcaagccggtcgacaagggcgagtggctgatgaacccgcagaccgtgaacgcctactacgagccgagcatgaacgtcatcgtgttcccggcggccattctgcagcctcctttcttcaacccggatgccgaggacgccgcgaactacggcggcatcggcgcggtgatcggtcacgagatcggccacggcttcgacgaccagggcgcacagtacgacggtgacggcgtgctcaacgactggtggacggccgacgacaaggccaacttcgagaagcgcacgaaggcgctcatcgagcagtacaacgccttcgtgcctacgcagctggacgagaagtacgccgacgagccggacaaggcgccgcacgtcaacggagcgctgaccatcggcgagaacatcggcgacctcggcggcgtgaacatcgcgctgaaggcctacgcgttcgcgctcgacgaggccgcgggacgcgacaaggacggctccgcgaaggctatcgaggagtcgctgtccgcggccccggtgatggacggatggaccggcctgcagcgtttcttcctgagctacgcctcgatctggcgctcgaagaaccgtgacgagctcgccgagaaatacctgcagatcgacccgcactcccccgccgaatgccgcacgaacggcatcgtgcgcaacgtggacctgttctaccgtgcgtttgatgtgacgcccgacagcgccatgtggctcgaccccgataagcgcgtacgcatctggtaatccgttgccggcaggcaggctgaaccgcacctgcctgccggcagatcatcgaaattcggcttctcccgccggccgcatgtccccggtcgtcgactcatcgagcggcgattcggcgaatcccgaaccgaactcctgcgcctgtgaggtctcctgcgtctgtgaggcctgcggattattggtcggggtttcttcgcccagattatcgaacgtcaccggcgttggatgcaccgggcgcgcatccgcctgctgtcccgcgtccgccgttgccgtgccgccgcccggagatggcggcaggccgggattcgccggcgtgccgttcccctgcgccggggcgtcacgatccgatttctggaacttcttcagttccgacaccccgtaattgatgtcgtggccgatattggtggcctccacaacgatgcgggagcgcctctcatcgttctgggtcgtccattcctccgtgctgagcacgccggtcacgatcgccgcctcccccacgtgcaatgacatgcgagcgttggacgcgagcgtcctgaacgccttcacggtaatccatgtggtcggcaggttgtgccattcgccggttccgccgtcccggtaccgccgcgtgctgcccatccggaacgagcatccctcgactcccccgctgcgcccgaacggcaccggcatcgatccgacgaacccggtgatggtcaccgtcccctgttgtatggccatgtcggcctcctttccttccctgtactgacgttggaccgccgatcccccttcggcggtgtactcactatcgcagatttcccgccggcatcacatggttttcggacaatgtggtcgaaggctacccctttggcgtgttgtggacagcatgtggatagaaaaccggttatccacaatcacgccgtcaatgcccggctcattcatgaccggctatgctgggttcggtatcgcagacgaacagcaaggggaatatcatgggcagaccgccatgaatgcgacagacccgtgacagcgcgaggatggggaagaatagtatctgcacatgttcggcatcaccctggcgggcgactggcggccgatcgcggttctgcccatcctgttcggccccgggggcataatgccatggatattgggcggcgccttcaataatcggccctggatcgtcgccatcgctaatgttctcgtcctgcaattcatcatcaacgcattgggcgcttccatcggacacttcgccatgtatctgacgttcggtccgcatgtgccgggactgaccgattcgaccaccggccgcgcagcagagcagctgtatgtctccagctcaccgcagacatgaattccaggtctcatcaccgccggtatcgccctgacgcttgccgtaatcatggccgctgtcactgtggcgagcagcgcaaggcagaacggcacggcgatgaatcgtctgcgcatcatcgcgtacatcttatcctgcctggaattcgtcgcattgctcatagcgatctgcataatgcttgcatctctgcgcaacaagcagaccaatatcctgctggcggtattggcgttcctgacactgatcgcatggattcccggagaaatgaagtcgatacgccgctgcgtcgcggaacaacgtgatgcttcatggcagtgcgtcgcgggcagcttcctggcattggacctgatattcgtgccgatgctagccgccaccgccctcacctcatggtgacagacatgcgccagtcgggcccccatcctgcgaaagtcccatccgagcatgcgtaaacgggactttcgctgggtgaagaaggaataaaacgcagaagtggggggtctttcgcatgaaagaccccccacttcgagcgatcaggagaagcagccggactacttgccgagcagcgtgtccagacgcgacgccagcgtctgcgcagcgtcggcgaccggcacggcgacggaatcggagctgtcacggttgcggatctcgattgttccgttattcacggtgtcacggccggcgactgcaatcagcggcacgccgatcagctcggcgtccttgaacttgacgcccggggagaccttcttgcggtcgtcgtagatgacctcgatgccgcgctcctccagttctgcgaccagcttctcggccgcgtcgaacgccgccgcatccttgccggtggcgacgacgtgcacctgggcgggcgcgatgacggtcggccatgccagaccacgctcatcatgatgcgtctcagcgatgcaggcgagcacgcgggagacaccgatgccgtagcagcccatccacacgggcacagtcttgccgttctggtcgagcaccttgaggtcaagcgccttggagtacttgaggccaagctggaacacctggccaatctccacgccgcgctcgaagctcagcgggccggaaccatccgggctcatgtcgccatgacgcacctcgaccgcctcgacggtgccgtcggccttgaaatcacggccgtacacggcgtggaagcggtgcttgcccgcctcgtcgccgccgatgatccactcagtgccctcagccacgtgcgcgtcgatgaagaagcgcaccggttcggcgacgcccgcggcctcgccctgcttgctgaagaccatcggccccatgtagccggccaccatctcgggatgggccttgagatcgtcctcggtggattcctccagctcggcgggcgcgaactgcgcctcaagacgcttcatatcgacctgacggtcaccgggcagcgccacggcgatgacctcgcgccacggcccctcatgatcatcgtcctcggggtgcagcacagtcacggccacggtcttcaacgtgtcggcggcagtccattcgcgaccgtcctcacgcgggtacagacggttggcggtggcgaccagatcctcgatggtcctggaatccggggtttcacggctttccatcgcgggcacggcggagctgtccacggccggcagctctggggtggtcagcgcctcgacgttccacgccttgccggagggcgccagcgcgaacgtgtcctctccaatcgccatgggggccaggaactcctcggacgcggaaccacccatcgggccggacatcgcgaacacgggcacgtacttcaggtcgagacgctggaagatgcgctcgtaggcgccgcgctcgtcgtagtacgccttcttcatgccctcctcgtcgatggtgaacgagtaagcgtccttcatgatgaactcgcggccgcggatcaggcccgcgcgcgggcggaactcgtcgcggtacttggtctggatctggtagagcgtgaccggcaggtccttgtacgaggagtacatatccttgaccagcagcgtgaacatttcctcatgcgtgggggcgagcaggtagtcggcctcgtgacggtccttcagacggaacaggttctcgccgtattcctcccagcggtgggtggcctcatacggctcgcgcggcagcagcgccgggaagtggacctcctgggcgccgatgccgtcgatctcctcgcggacgatggcctcgatcttgttgaggaccttcagacccagcggcagccaggtccagataccgggagccgccttgcgcacatagccggcgcgcagcagcagtttcgccgaatcggtgtcggcgtcggcgggatcctcgcgcagcgtgcgcaggaacatggtggacattcgaagtgctttggaactcatgggttccaaggtattcgcgttcggggacattgcgggcccggttcagttcggcaaacccgcagtattgaaaaaggccacccacccggagctcaccgagcgagcggccttcgtattggcctcgcagccgtgccgcgcttaccgcgtcatccggcgcagccgttcgagggtaatgccggccgccagcatggccatcgccaggacggtcaccagcgacatgtcgataccggtatgggccagcgaatcggccgcggacgtcttgcctccccggcaactacgcccgtgttcgcgcccggcttggcggaagacgagccatcacccgacgtgccacccggcacggtaccgggcttgttctgctcattgccgcccggcgcggtgctgttcggtctgggctgcgtgacgatagcactgcgggcggttcatcagaaaggccgtcaaccgttgcgcgcatggtccctgtacgcctctttctctttgcccgtgtcgctgatgtgctgtgcgacctgccgatgctgccgagatacatgtctgaagccgtcagcgtggctgtcttcactatgctcgcgggagccgcctgtcttatcggcccgggcaatatgtcgccgagcgcatcatcgtcgccttcatcagcgctttgagccttaccgtcatcgcgatctccgatttcagcaatcgcatggttgagaaaaacctcgtggcgattgccgcatatgtgctgctgccggcattggccgccaccgcatggctgcgtacatgccatccgatggccgacagcgcgacccgcaacctgcgctggatattcggtgccgccgcgcgctacgaggcaagcctcgaatcggtgcaatcgctcggaaaacgcatctcacagctgcgctagcgcaccgctacccggcgaaagtcccatcagcaccatctcaaatgggactttcgcgggattgatgtcttcctccgcccaatagcagtcccatatccgaaagcagccaccgctagaacagctcggcttgttcgaattcgccagcaggctcgtcctcgtgaggcgtttgcggccggaacgcagccacgccctcgtcgcccagccgcgcgctggcggcctgtgacctgccgcgcaaatcgccgtcgagcatcaccgcatccgccgaaaccgcgaacatgcgctcgttgacgccggcaagatacaatccgcccatgcgttccacacgcgagagcgccacatatcccatgccgggcgcgaacgtgcggctcagatccatcaccgcccggtcgagggtcatcccctgcgacttgtggatggtgatcgcccatgcgcatcgcaacggcacctgcgccacggacgccatcaccgtgtcgccgtccatcatctcccacgtggcctgcttcatcgtgacgatgttgccgttctcgaattcgacgatgggccagccgcccttgctctcgttggcgaagccgcgcacggtaccgagcgaaccgttgacatactggtggtcggcgtcgttgcgcagcgccatgacggcggcaccggtcttgagcacgaggcactccggcgccagcatgttgcgcttgagccgttcgaccagatgggccggccccatctgcttggcatggaactcgtgcggctccttgtctatccgcgcaagcctggaatcgttgaggttatcggcctgccggttgacggggaacaggtggaccgccacctcgcccggctgcggtgtcacaccgagccgcgtgacgagcgcgtcacggtcatcctgatccacgcatccggcacggatgtcggtgagcacgtgcagcagccggccgtcgtcctgacgatgctgctcggtcagatagcagatgaccggcgcgagttcgccccacaccagcgattcggtgacgaatccttccggattgagtccggccttcgcgtaccgttcgcgggacgccacgaaatccgggccgggcggcagcacgtcgcggtcgcgcccggacacggagaccggcggcagctggaagaagtcaccggacagcaccacttgcaatccaccgaacggccgcggatcatgccgcacttcacggcacacctgatcgaccatgtcgaacagccaggcgtgcatcatcgacacctcgtcgatgatgagcacgtcggctgcctgtatcttgcgccgacgacgggtcttgatggtcttcagcagattcggcgtcagcacgttggcgagtccgacgccgctccacgagtggatggtctggccgtcgatatgcgtggcggcgatgcccgttgacgcggtgacggccacgttcgcgccgtctgcgcgcgcctgccggatgaactcgttcagcacgtacgtctttcctgcgccgggcgcacccgtcaggaacacgttcgcgccggcgttcagaatcgcgagcgcctcagactgccgcatatgccctccttaagctcatgcatcacgcacgatccgcgcgccctggcgtatgacatcgctcgcccgcgggctcagaccagccggcggaccacctgcagcacgccgtgctcggtgttggccggcgcgatgtaccgcgccgcgcgtttcagatccggatgcgcgttggccatggcgaacgaccatccgccggcgtcgagcatctgtaaatcgttgagatagtcgccgaacaccgccgtctgcgcgggcgtgacgccgagatgccgctgcagcgcgacgacaccctgccgcttgtcggttccgggattcatgatatcgacccagtgcgctccggataccaccacctgatgggtgcgttccacatcgcccagcaggttcgcggccatgccttgcgcgtcgccgaaatcgaagatcgccagtttcagcacggtttcgtcctcggtctccagcacctcgtgcaggtcgtccacgatgcgcagcgccttgtagtatttggagcattcctcgacgaacggcctgtcctgccgctggatgtacgccgtgttcagaccgcataccacgagtccgatgtcatgcgagcccgacgccaccgcggcgtccaccagatcgatcagcgtacgcgtgatgtcccagctcaccccgtgcacgtcgatgacgttgtcgtcggcgaccacgacgttgccgttctccgcgatatacgacatggcgccgtcgacgcggtccgcgaacatggagcgcagcgtggcgagctggcggccggaagccggcacgaactcgacacccttggcgtgcagctcgtcgagcagcggccagaagtcatcggggatgttgctgtcgccgtccagcagcgtgccatccatgtccgccacgatcaggcggatgtcgtgcggcttgtcgcagatggcggtccaatcgttcgcggtcatggtgtcgttcctctcagtcgtgtgcgtgacgttttctgtttttcgagaccggccggctacttattcagcaggctggtggcgacgatctggtcggcgatggccttcgactcggcctcgttcgggccgggagccggcgccatgaacgcctgacggtagtagcgaagctcgtccagcgactcgatgatgtcggcgagggcgcggtgcccgccgttcttggcggggcggttctcatacaccgcggggtaccagcggcgcgcgagctccttcagcgtgctcacgtccacgctgcggtagtgcagatggctcatgagacccggcatgtaatggtcgaggaatttcttgtcggagccgatggtgttgcccgcgagcagcggcctgactccatccggcgtgaaccgcagcacgtattcggtgaccttgcgttccgcctcttcgagactcaggccgtgctcccattcgttgatgagccccgaacgggtgtgcatggcgcgcacgaaatcgttcatgtgccccacggcggcgtcggacggcttgatgacgtagtccacgccctcgtccaacacgttgagatcgaaatcggtcgggaccacggacacttcgacgagctcatcgccaccgaagatgtcaagtcccgtcatctcgcaatcaatccagatcaggcgcgaatccttcgcgctgtacgtttccgcatcatggctgtcgaccatcgcaagccgcctttcctgctgtgctttcctagggaacgttacaggctatagcagaccggggacgcgccgtcaggccagcgggaaagagagcagcatcgtagtgccggacggggacgaggactccaccgcgaccgagcccccataccggttcgccacgtcacgggcgagcgcgaggccgagcccgtacccttggtgcgcggtgccgtcatcgtcccgggcgaagcggcggaacagtcgttcgggatcgccgccgatgcccggtccatggtcggacacgcggatctgcgcccatttgcgatgacgcgcacacccgagcaacacggccctgccgtccggatccttgatgatgccggagtgcggcttgagcacgcccagtcgcccaccaccacgctggccgtctgggcgttgaacccccgcagcagcgcgcgcaaccggtcctgcagttcaatgaagtggaacggcttggtcaggtagtcgttcgcgccgcagtccagcccttccacgatgtcgtccacctgcgcgagcgcggtcagcatcagcgcaggtgtagtgacgccggagccgcgcagggtgcgaatcaaatccagcccgtcgccgtcgggcagccggcggtcgacgatcagcgcgtcatgctcttgccctatccaattggggccccgctaaagcgccgctaagaagacacgcgggcacgacggaagcttggtgtcgcggcacgacatgacccgccgcttcgggggaaacgggacggatataatcttggacattcgggacgcggccgcccacgcgccattacggcagcgcaaaaatggcagcgcaggaacggcagcggtacatgcatacggccaggaggactacatggcagaggaaacgcaatctatcacgacgcggcacgatgccgagaccgacccggcactgtggtggcggcaggccgtggtctaccaggtctacccgcgcagcttccaggacaccaccggctccggtctgggcgacatcaatggcatcaccgggcggatcccctatctgcggcagctgggcgtcgacgcgatctggctgtcgcccttctacccgagcgaactcgcggacggcggctacgacgtggccgactaccgtgacgtggatccgaagctcggctcgatggacgacttcgaccggctggccgccgccgcgcatgcggcagacatcaaagtggtggtggacatcgtgcccaaccacagctcccacctgcacccctggttccgtcaggcgctggcggacggccccggctcccctgcgcgcgaccggtacatcttccgcgacggcaagggcccgaacggtgacgagccgccgacccgctggcagaaccatttcggaggtccggcatggacgcgcgtggacgacggccaatggtacctgcacatgttcaccaaggagcagcccgactggaactggaggaacccggacgtgtgcgccgatttccttgagacgctgcgtttctggtgcgatcacggcgtggacgggttccgcatcgatgtggcgcacgggctcgccaaggacctcgaccgcgacgacctcgacgactacgtggtgatgagcacgaacgacatgcccgcggacggatcccacccagtgctcgaccgcgacgaggtgcacgacatctaccgtgagtggcgccgcgaggtgttcaaccgctacgatcccccgcgcttcgcggtcgccgaggcatgggtccggccggaacgccagtacctgtacgcgtcaccggatgaactggggcaggtgttcaacttcgagttcgccaaggcggattggaccttcgacgcgatgagcaaagccatcgacgaggggctggcgtgcgccgagatgtcgggctcgacgtccacctgggtgatgagcaaccatgatgtgccgcgccacgccacgcgttacgcgctgccgcaagtgccgaccggcgaataccatcagatcgccaacgactggctgctgcgtgacggcaccacctatatcgaggatcgccaggccggcgcattgcgggcacgcgccgcactgatgctcgaaatggcgctgcccggctcggcctacgtgtatcagggcgaggagctgggcctgttcgaggtggcggatattccatgggaccgcatcgaggatccctccggcctgcgcacctcgcgggcgcagtccaccaagggccgtgacggctgccgcgtgccgctgccctgggtcgcgtccgacgtgcccgagacgtacacgtccgacaagaggcacgtccataccggctcgttcgggttctcccctgccgtcagtgacgccgaaccacacctcccgcagcccgcgtggttcaaggatttcgccatggacatccaggacgccgacgacggctccatgctgaatttctatcgtcgcgtgctgcggctgcgtcacgagatgcagactccggacaccagttgcacgttgcttcccgagaaccgtccgagcggcatgcgcgacggcgccgacggccagcccggcggcgtgatcgcctaccgtcgtgccaacggttgggcgaatctgacgaatttcggcgccacaccggtttcactgcccgacggcgaggtgctgctctcgtccgcgccgctcaccgatgacggccggctgccgcaggatacgtccgtctggatgcggctgcggtaggcatgcccgtgcccgccacgacgcgggcggcggagccgattcgacgcggccgggcctatatgcaagatggcgggctcccctcgcaaatcgtgaggggagcccgccatcatattcatatgagccgaatcctatgaaccgatcggcatcggcctatcagttgtggaagccggtgtagttcggcgcttcggtggtcatcacgatgtcgtgcggatgcgactcgcgcaggccggcgtcggtgatgcgaatgaagcggcccttctcctgcagctcggcgatgttgtgcgcgcccacatagaacatggactggtgcaggccgccgatcagctggtacagcacggcgttcagcggcccgcggtacggcacctcgccctcgacgccttccggaacgaccttgtcgttggaggtgacgtcggcctggaagtaacggtccttggagtaggacttcttgccgcgcggggccatggcacccagcgagcccatgccgcggtacagcttgtactgcttgccgtgcagcaggaccttctcgcccggagcctcctcgcagccggccagcgtgccgccgagcatgacggtgttggcaccggcgacgagcgccttggcgatgtctccggagtagtggatgccaccgtcggcgatgcacggcacgccggcggccttacatgcctgggcggcgtcatagacggcggtgagctgcgggacgccgacaccggcgaccacgcgggtggtgcagatggagccggggccgacaccgatcttgacggcgtcgacgcccgcgtcgatcatggcctgggcgccggaacgggtggcgatgttgccgccgatgacctgcacgccgcggaaggcggggtcgcgcttgatgcggctgatcatgtcgagcgccagacgggcctcgccgttggcggtgtcgacgacgagcacatcgacgccggcctccatcagagcggaggcgcgctgccaggcgtcgccgaggaagccgatgccggcggccacgcgcagacgtccttgctcgtccttggtggcgtccgggtactgctcggtcttgacgaagtccttgacggtgatcaggccggcgagcttgccgttgtcgtcgatcagcggcagcttctcgaccttgtgctgggcgagcagacggtgggcgtcatccttggagatgttcgccggaccagtgatgaggttctccttggtcatcacgtccttgaccttgaggtggtcgtagtcttcggacgggatgaagcgcatgtcgcggttggtgatgatgccgacgaggcggttctccttgtcaacgaccggcaggccggagatgtggaacttgccgcacagcttgtcgaggtcggcgagcgtgacgtccgggttgacggtcagcgggtcggtgatcataccggactcggagcgcttgaccacatcgacctgggccgcctggtcgtcgatcgacaggttgcggtgcagcacaccgataccgccgttgcgggccatggcgatggccatctcggattcggtgacggtatccatcgccgcggagatcgccggaaccttcatggtgatctcacgggtcagatgagtggtggtgtcgacttcggagggaatcacgtccgtctcgttcggcagcagcagcacatcgtcatacgcgaggcccagcttggagaaaatcggggggacgggagcataggattgcatattcgcttcagaatttgtagccatgcattcactatatgagcgtaatgcgacgaatgcgacacgaacatggtctcgaccatcatcatcggcaggtcacgggcgccgttttttcccgtcaccgctttcgtcaaacgaatgacgtgcccgtcgccgcgcggatgcatacgactggttctccgcgacgatctccggcaggcgacgcttcagatacgggtacatcgtcgccaccgtcagcaacaccacggcgatgacgaagctgatgagcacataatggaccttgaagaacaacgtcatgatcgagccgaccgcgatcagagccgcccacccccacagaatcagcaccgctccctgcacggtgtggccgatgcgcagcatgcggtgatgcagatgcatacggtccgggtgcatcggcgactgcccgtggctgagtcggcgcacgatcgccagacacatgtccagcactggcaggaacagcaccaggatcggcagcaggatcggcatgaacaccggcaggtacacgctggcatgaatcgacgccggatccagacggccggtcatcacgattgacgcgcaggtgatgagatacccgagcagcatcgagccggagtcgcccatgaacagcttggccggatgccagttgtgcaggatgaacccgacgcagatgccgaccatcgccacgtcgatcagcgtcgccatcgaggcgtaggacggcgaattgcgcgcgatgatgtaggagtacgcggcgaacgcgacgccgccgatggcgacgatgcccgccgcgaggccgtccaggccgtcgacgaaattgaccgcgttgatcgacgcgacgatcagtatcgcggtgatcgtcaccgagatactggggctggcggtgatcagggagccgagcggcagcgatatgatctgcaggccgccccacgccacgaacaccgagatcagcagctgcccggccatcttcagcatccagtccagatcccacaggtcgtcggccatgcccagcaggcatatcagcaccgcgccggcgaggatcacccactcctggttgttgttctcgaacagtccggtcgtgaatgcgatgcgactggagtagatcattgcaaacgcgaatccgatcagcatgcccagtccgcccatgcgcggcgtcgggatggtgtgcacgtcgcgcgcacgaacctctccgaccgcgccgatatggatggcgacatggcgaatcagcggcgtgaccagccaggtgacgccgcctgcgatggcggcgatcagcagatatatcctcatgcgcccagaccaccaccgttcatgtgcacggccttgcgcacgacgggctgagggatgacaccctctcgcaggatgacgatgccgtcgcgctcatgagggtcggcggcgaccaccgtgctggcgacatggccttgcgtcggcccgccgtcaagatacagctgcacatcgtcgccgaacgcctgcacggcctcttcgaccgtctgcgcgctttcgtcgccggaacggttcgcgctcgacgcggcaagaggaccgagctcattcaatatgcgcagggtcagggccgaattcggcacgcggatgccctgcgtacgcctgccctgcggggtggcactgaccgtggcgagcgtgcagtcctcgcgggccaccgcgatcggcgagaacgcaccaggcaggaactgcgcggccagccggttcagcggcgacggcaggtcgagcccgagcccgtccaactggtcgacggatgccagcagcacctgcagcgctttgaagcgcgggcggctcttgacctgatagatgcggtcgattgcggcctcgttgcgcgggtcgcaggccacgccatacaccgtgtcggtgggaatgaccaccaagcctccgcctgcgatgaccgacgccgcctcggcgagggattcctcattcaccttgcgaaccgcactcatcagacctcccgtatcgcgtatcacgcccatcgcggcggtcacatgccgccgcgcgtatccgaataccgctatccaagtattatggcacgtcctgccacaccgatggtaggccggtgcatggcccgacgccacgggttcgctctcccccgcgtcgcgcgggccggcctggacacggcttcccattgcaccattgcgccacgacttggcgctggccggcgccggcgacgacgggcctcatgtgacggtacggcggagagacacgaccgtatccgcccgcgagcgcgaggaaatgctcgccggcaaactctacaatcccgccgaccccgagctctccgctatgcgagagcgcgcaggcgacttgtgcacccggttcaacgcgctgcctcggggagaccacgccggccgagccgcggtactggacgagctgctgccgccgatgcatccgatccggttccaggaccgcaacgtgcggcgtgcggctgacgggtcgtattacgactacgagtatggcaagccgatcgtgatcgggtcgaactgctggttcggcggcaatgtgacggtggtcggcggcgtgacgatcggcgagggctgcgtgatcggcgccggctcggcccggccacggcatcagatcctgggtcaggatctgaccgcgaacaggtaccggggccggccggtccagtcgtcgccggtataagcctggccgaacccgttggcctgtgcgaaggagaccagccgcggcccctgagagatgtcatgctccatcaccagcacgccgccggggcgcagcaatcccgccgctcgcatcacgatccgctccggtatcagcgtgccgtcggcggagccgccatacagcgccgccttcggatcatggtcgcgcacttcgggctgttcggggatctgcgcttcggggatgtacggcggattcgtgaccaccatgtcgatggtgccgtcaaactgggccagcgtcgtgccgctggtggcgtcgccgagctcgagatgataattatcggcggccagcgggtcgagacgtgatatcctccgccagttgcgcatcgtccagtcataggtgcgcgacaccttctcgaccgcccacacctgcgcgccgcgcacctcggtgaccagggacagtccgatggcgccgctgcccgcgcacaaatccacgatacgcggggtggacagccgttcgcgcgtgagccagtcgatgccggcctgcaccacggtctcggtttccgggcgcgggatgaacacgcccggaccgacttccagatcgaggtagcggaacggggcatggcctgtgatgtactgcaacggttcacgtgcggcccgccgagcgatcatggcgtggaatcgggcgagcgccgtggtgacggcatcgcccgcagtggcggagctgtcggagctcgcgtcgccggcatccggggcatcaaaactcgcatgctcgtgcggcaggccgtccagaggctcccccatcaacatcgccttgtctatgtcgcgcaggtcgcggccgcacgcctcggcgagcaacaacttggcatcatgctcgggcgtgtcgatgtcggcgtcatgcagcgtccgcgccgcggagcgtatcacgtctgtcacgtcatggatggattcggatgtcatggtgtccttccgctcgttggtggctcatcgtctcagggcgttcatatcacggcgtttcgcaccggggcgtctgccggcatattcgccgttgcgtcgctaagtgcgcgccgaaacgaagtacgcgcgcacatagcgacgcaaaccacggattttccgttcctaagtgcgcgcacttgtcgtttcggcgcgcacttagcgacgcagagacatcaatgggggtgcgattccccagggaaccatcactctgaccccgccgatggccggtcactgctggttggcgagccgctcggcctcgtcggcttggatgtcggagtcgatcacggcctgcaggtcgccgtcgagcacggcgtcgaggttgtacgccttgtagttggtgcggtggtcgacgatgcggttctccgggaagttgtaggtgcggatgcgctcggaacggtcgagcgaacgcacctgcgagtggcgcatatcggcggcctcggcggcctcctgctcatgcttcatggcgagcaggcgcgatttcaggacccgcaacgcggcggcgcggttctggatctgcgacttctcatcctgcatgctcaccacgatgccagtggggatgtgcgtcatgcgcacggcggagtacgtggtgttcacggactgtccgccgggaccggagctcatgaagatgtcgattttcaggtccttcggatcgatctcgatctcgtcgtcgtcctcgtcggcctcggggaacacgattacaccggccgcggaggtctggatgcggccctgcgattcggtgacggggatgcgctgcacgcggtgcacgccgccctcgtatttcaggctcgcccacacaccgtcctccggcgcgggcgtgcccttggcgcgaatggcgatctgcacgtccttgacgccgccgagctcggtggtgttctcggactgcacggtgacggcccagccgcgcttctcagcgtatcgcagatacatgcgcagcaggtcgccggcgaacagcgccgcctcctcgccgcccgtaccggccttgatctccatgatgacgtcccgggcgtcatcggggtcgcgcgggatcagcgcgttccgcagcttctcctcggccgccggcagctcggcttcgagccgcttggcctcatcggcgaattcgggatcctcccccgccatctcgcgcgcggcctcaaggtcgtcgcgcacggccgtgtatgactgatacgcggatacaatcgcgccgagttcggcatgacgacgacccagcttgcgcatcttgtcggggttcgtcaccacctcggggctcgccatctgctgttcgatggattggtattcctccaacgcggtctgtgccgcggggaactgctcgactgccatgtctggcttgtccttccggatagtaacaacggtcggcaccgcgtcatcatcgctgtcgcgacgccattacagatacaaaaacgccagtcccccgagcgggtgcgccgaagcgcgcccaacccgtgcgggactggcgtcagatacgctacttggtcttcttgccgtaacgcttctcgaagcgagcgacgcggccaccggtgtccagaatcttctgcttgccggtgtagaaggggtggcacttcgagcacacgtcgaccgtcatgtggtcgcccttgtaggtggaacgagtgacgaaggtgttgccgcatgagcacaggacttcaacggcatgataatcaggatggataccctgctgcatggttttgtctcctaggggattcgggggacccgggtcgccgcgccccgatggctggcgtgaaccggaacctacggaagtatacgccgaggcatggatttcagtggggccgcaggggcttgaaccctggaccggcggattatgagtccgatgctctaaccgactgagctacagccccacgttggcgaataggccaaccgtactattgtatagcagaccatcggacttgcgacaccctcccaaccgcccatcgtctgccacggctatcatgtcggcagggccggcaatcgggccgggacacgcggaaaggaacgcacatgcgcattgcggtaccgctgcccggcacgatgtgggcgttcgatgtcatctccatcatccagatcttcgacgacgattccgtcatgtacggctcgtccgaccgtccggtcatcgacttcatcgcgaatgcaagctccaaggcactcgaccacggcatgtccatcgccaccaccgcgctgcgcgactaccacgagaaacctgatctgatcatcatccccggtttcgccaacccgcatgagatcgccaccgacaggcgcaccagggacgccaaggcacggctgttcacagccgatcccgccgacgcgctcgccatccgcgactggctggtcgcgtcccaccgcgagggcgtggagatcgcggccatgtgcacgggcatgttcgcgctggcatggaccggtctgctcgacggcgtggaatgcaccacgcacctgccgttcctcgacgatttggccgcgcagtttcccaaggcgctggtgcagaaggaccgtctgctgacgcacaacgcgaagcagcgcatctggacgtccgccggcggcagcatctgtctcgacctgtgcatcgcgctactcgccgaacatgccgggcagtccctggcgacggcggaggcgaacatgctgatgatgcattacccccgttcggtggccacccggcgcagcgacggcgctccatccgtcttgccgcgaccgtcccggcagagtgacgagatcatcgcgctgacccgcagagtccgcgagcatctcagttatgactggacgctgacgacgcttgcgcagacctcccactcctccacgcgctcgttccagcgccggttcagcgaggtcatgggggtgccgccgagcacctggctgctgacggagcgtctgaacgccgccaaggaactgctggagctcaccgatctgccgatgcagcagattgcactgagaacgggactgcgcaacgcggattcgctgcgcaagcatttctccgccgcgttcggagtcagtccgagtcggtatcgtcaggattttctgcgcaccgaattgcgtccgacggaaaacgtgtgagcccgctggccggcgaaacgaacatgaggagtcggatatcggccacatgacgcggatttctctgtgttcgttttgttcggtactgtgcgcattcctcacacttttcttattgagaatgattcgctgaaccatcggcggggcaaagtggcgcgttcttaccgatatttggcgcgaaccgaccgcatcggcacccggttttcccgcgaccgacgcttagactcggacttgaaacaatgttgttaacgccatcatgacagacacggatgtgtgtcatgccggcgcgatgaaaggatacgaacatgtggcctatcctcttggccctggtccccgcattcggctggggttttcagggcattgtcatgcagaaggtcggcggcaccaccgccaacaagcagatgggcatggtgctcaccacgctgctgttcggtatcgtggtgctgatcttccacccgatcaactggtcgtggacgctgatcgcggccgcggccatcaacggcatcccgtggagcatcgcgcagatactgcagatcaagtccttcgactatctgggcgtggcccgcgccatgccgctgtccactggcatgcagctggtgttcaccaccctgctcggcgcgctgttcttccatgaatggacgcacggctggcagttcggcttcggcatctgcgcgctcgtcgtcatcatcgtcggcgtcgcctgcaccgccttccaggagaagagcgaggacaagggtccgtcgaacctgaagcgcggcctgctcatcaccctgatctcctcactgctgtataccagctacgccgccgccggcaagttcttctcggtctccagctgggacatgctgttcccgcaggccgtgttcatggtgctcggcacgacaatcatctccttctgcatgagcggcaaggacgcgatggaccccgaaatcggcgtgttcggcaagaagagctggatgaacatgagcaccggcgccctgttcgccaccgcgaacctcaccgtgatgctgtccaatgagatgaacggtctggcggtcggctggacgctgtcgcagatgaacgtcatcgtcgccacgctgggaggcctgttcattctcaaggagaagaagaccaagaaggagatggcgttcgtcatcgccggcatgattctcatcgcgctcggcggcatcctgatcggcatcacgaagaacgcatgaccgccgcccgcgcatcatcaaccatcaaccatcaacaagtcaacaagtcaacaagggagtatcaaccatgatcaatgtcggtttcatcggatgcggcgccatgggccgcgaccacgtgcgtcggatcacggacaaatgcggcaacgcgcaggtcgtcggcgtatacgacaccgtgctcggcaacgcgaagcaggccatcgaagacaaccgcctcgacgcgacgatctacgattcggccgatgcactgatcgacgatccgaacgtcgacgccgtcgtcatcgccagccgcaacgacgtgcatctcgacccgctgctgcacactatcgcgatcggcaagccgacgttcaccgaaaagccgatgaccatcaacggctccgacagctggaaggtcgtcgaagccgaggtggccaagggccgcaaaaccattcaggtcggtttcaactggcgcttcgaccccggctacgacgcgatgaagaccttcgtcggcgacggacagatcggcgccctgctgatggccggcatgcgtcactacaacgcgcaggcatccacgagctactacagcaccgacaacgtcatcaacgacacgctcatccacaacttcgacatgctgcattacatgttcgacggcgacatcaccagcgttgagatgaagttcgcccggatgaacacgctcaacccgaacggggagtccttgcgcgaaccgcagctggccatcgtcgagttctccgacggagccctcgccacagccgaggcgaacgtcaactgccagtatggctacgacatccaatgccgcctggtcggcgagtccggcatcatctcgctgccggatgtcgccacgccggaggtgcgcaaggccggtcagatcagccacgcgatctcgtccgcctggttcgaccgattcatcgaggcatacgaccgcgagttcgaccggttcttcgcgaatatcgaggccgaccggcagccgggcggcaaggaggcgaccgcatgggacggctatgtggcgaacgtggttgccgacgccgcgctggacagcctgcaccacggcgggcgcatccccgtgacgctcaacgagcagccggcgctgtaccggtaatccgccgtttgttcaacggctcaggccgcccaccacggacgcagcgggtaccagttgcccttcggcagcccctccttgtcgggcttgacggcgaggaactggtgcacctggatgccgttgagctcgaagttcaactcgcacgcggccagatacaggccgtacaccttcgcccgctcgtagccgacctgcttgacggcgtcggcccagttggccttgagattggcgttccaatgatgcagcgtcagcgcgtaatgctgccgcaggttctcctggttgacgacctcgaagccggcgtcgtgcagcgccgactcgatgaacccgggcgaggcgaggtcgccgtcggggaagatgtatcggtcgaggaactcatccgttccgggccggttgttcggcttgtccttggagatcgtgatctggtggttgagcaggcggccggccggcttgagcagcttgaacatctcatcgaagtagtggcggtagttcttcgcgcccacatgttccatcatgcccaccgaggtgatgccgtcgaagtctcgttccggcacttcgcggtagtccatcacgcgcagctcggccagatcctccagcccttcgcgcctgatccactcctgaccgtactcgatctgctcgtgcgacagcgatacgcccagtgccttgatgccgcgcttggctgcggcgatgaccagagcgccccagccgcatccgatgtcgagcatgcggtcgccgggcttgaggtccagcttgtcgagcaccaggtcgattttgttgcgctgcgcgtcatccaggctcatgtcgggcgtgtcgaacaccgcgcacgtgtacgtcatcgacggtccgatgaagtcggcgtagaactcgttcgacaggtcataatggaagctgacggtctcggagtcggccttttcggtgtgcgggaacagaccggacttgatgcgttcgaatttcgaggggccttcggactgcggcacctccaccttgtggtagccgtggctgagaacggccgcccccatgcgcgccagctcgagcggagatggctttcggatgtacgatgccagttcgacgagcttgcgcagctgcggatacgggtcggccacgtccagtccttcgatgtcgaagtagcccaggatgtatgcgcgggccaaaccgatctcgttcaggttgctcgccaactgatagatggccttaggactggtgacccggacctgcaggtcggcgtcttccggcccgaacgtcgatccgtcgaaggcttcgatgcacaccggcgcgtcctctttgaggaccgcctgcgccatttcacttaccaacatggttttcccactgcccatgtttcgcctcttttcccaacgactgtgccttgccggatatggcaatcaccgtgtcactgtagtcccgcgtcgtcatttttcgcgctgcgaggaaacagaaaacgctcactatgcatgcatcgggcaaccactatgtgaccagccactctgaaagcgaacatttggcggatatatatggacagcgcggccgcgccagtcgcattccgcatgtgaatcggaacgcggccagcggggccgcggttttcaggatgatcccggaccagccgtcatgagacggcgttcgtgtactccttcagggattcgccgatgccgccggactcgccagacgacttcaacgcggtgacgtgcccgtcggtatcgacgccaagcactccggagattgggttgatggcattgtagacgacgtcatattcgttgagtagcagcaggaactcggcggtgccactcgccttcgcctcgttcagcagcgtggttgacgtctcgcgtcgaacgatgccgctcttgtcgacgccgcccacctgcgcgacctcaatgatgtcgccgactttcgcgtcgcccttgatgactttggtgacacgcacccgggtgacggtctccggcacgcccagcgagtccatgtcgatgtcgtcctccgtcagcccgtattgcgggttcgtttcaggcgttccggacgtgaaatcgatctcgggatacaggatgcgctcgcgcgagtcgagcgggacaccggtgaccaccagaccggcggccttgacgccctcttcgacggaagagtagccgggatagtcggcggtgatggactcggcggtcttcgccgtggtctccgtcgcggtcttcgccgtattctgcgtcgagtggccagcggtcggagagccgacggaatgcatatgcacggcaacacccaccaccagcgccgcaacgagcgccatgacggcgagcgtgcccttgatgacgtttgactgcttcatcagtaacagctcctcacgtaactcatgtcatatgcctgaggcatacggatatatctttcaatcacagttcagcaacggtattcatcagcggccagaccggtcggctgattgatccgtcaattattttttttcatatcagtctccgatgtccagcatgcagtgaatccgcgccaacttcgccgttgacagagcattgagtaaagaacagccgttttgtatataaaaaataagagaaacgctgtaaattcaacgtttctctcacttttcatcaatgccgcagaccggaatcgaaccgttttacttaatctcaaatactgatagaaaggggctttgaagacttcatcacggttgcggtgttcaaaaagtgttcaaacgtttgttgcatacaaactgaaatttgtcatatccctatttctgagtagattttttcgacaaacggtgacttatgttcgatatacttctcaatatcaaatggatagagcgcagcgccttcttctttaattctactgtattcacgcacagcttccggatgagaacgcaaatattcacggaaagcaatatgccttttcagttcctcagaatctcgcgggcatacatatagatgatgcttccgcaaatgggttttgccttcatatttaaatgcttcccgtccggcaataccaaggtttccttcatggtgatagtcgattctttctaaggcagagattacagcgtcaagcatggagtaatctttaatgacgacatcaatatcaataatcggtttcgctgataaaccatgcactgaagtgctgccaacatgttctatcgcaagagccagttgatcaagagcttcctgaatttcactcttgatttcacaaaaatcccgtgcccagtgtttatcataaggtagcacaacaacatgctttgtaatcattctctttacctccacaaatcccgatttgtctgtttcacaatgtcaataagaggaagaatgacaggcttgcttttcagaatctcggtatttcatcataaagtgttcaaaggtgttcaaacattttatataaaaaacagctatgaccaaggtaagtattttcaaaggccggcatcggcatatactgtgatctatgattactacgtttactattcgcaacgtcgccaatgaagacggtgccgcgcagatcagcgatttcggcgctcacgtgctctcctggacacccgcgggcggccatcccgccgtatggcagcccaaggccgtctatctgggcaaaccgatccgcggaggcgtgcccgtggtactgccatggttcgcactcggtttcgagcatggcgaaatcgccggtaagaagccgaagcacggattcgcccgcacctctgtctggcatgtggacgaggacgcgaccgacgaccgacgcatccgatacacgctgtccgacgccgacgcgacgcccgaactgctcgcccagctgcattccggggcctccccgcggttccatgcggtctacgacatcgaagtcggcaaggagctgaccatgacgctgaccgtcaccaacgacggtaccgagccgctgcgctatgagaccgcgctgcacacgcacttccatgtcggcgacctgacccaggtgagcctacacggattggagggctccgactatctcgacgccacggtcgccgggtaccctccccgcgtgcagcccgatgagccggtgaccttcgacggcaccacggtcgaccgcatctactactccaccgacacgttgcgtctggatgacccggcatgggatcgcgtcatcgtcatcgaggcccatggcacgaagcagaccgtcacatggaacccgggaaccgcggccgacaccgaaatcggcgacatgcagcccggcgaatggcgcgatttcgtagccatcgaggcagccgcctgccgcgagtatgccatcgagctcgctcccggcgaatcgcacgcgctcacgcagcgcatcagcgtcgagaaccgctgaaaaaccgattcattcatacggccgccgcatctgccggcggccgtcaccatctccggcggcaaccgttcacagcagctgatacagcgcagcgctggcgttggctatcgccgtccacgacgagccggaagtcatgatgacgaacgcatagtcgcccttgccggaatatacgatgcccgcatcatgcaggtacgagtcgcggaatccgaccttgtcggcaacggttccgttgccaccgatgccggccggtataccgctgcggtactgctgccgtttcatcaggccgatcaccatgtcccggtcgtcgtcgttccaaatctcgccccgatacagtttggtcaggatcagcgccagatcggccgatgtcgtgcgcacgtccagataatgcaatgtcgtgttcttcgcgccgagcgcgttcgcctgctgcgttactttgtcgtagccggtgccgttatcgcgcatcagccatgccttgggacattcgttgtcggaatcaacgatcatcgtggtcaggcactgctgcagcgtcatgccgttgagcggcgaatcccatgtcatttcgcctaattccacggccgtcaccatcgaatgcgccacgaacagcttgtacgtgctcgccgatgcgaacacctgggaggagtcgatgtcgacgagtgtgccggcattgctcagatcgaccacggagacggaatatctcgcgccggaaaacacaccggccagcgcggcggatgcctgggcagtcaggtcacgttcgggctgggccggagccggcacggccgccttgaacatgctccgagacgccgattgggaacgaaccctgccggaccccgacttgtcggagaaactttcgtcggaggagccgtcatcggcgacactgccgtcggtggggtcgaccgtggcaccggaccgggccgcaccggctgatgaaacgctgccggacgagccatcgccatcgttcgagcacccacgcacggacaatagcaccaccatcgtcaccacggagaacatcgcgatcagcaccgtcagacggcggcgcacatacgtcagctcacgggtggatattattcggccgccaggcgggttcgaccgccgacgagggccgacacgaccgccggcatgcggcacgatgccgcgcaggatacgtcccgtcctgcgccgcggcgggcgcatatgctttgccatcgcgcacctccccgactgctcacatcgacgcccccattgtaaccccccgaacgcagctagtcaggggcgagcatccacaccttggtcacccgtcatggcacggctaagacaggtcatatatgacggccggacgtcggcagtatcgacaggtacgtcaatgccgccgacgcccgtccggtcaatgattgctcagcgaccacggcggaacggcgccgcgttgcgcttgccgtgcgacttgcggaatcccgcggccttgcgcgtggcacggttcggcccgctctggctcctgcggttccgcccgtcacgacggttgtcaccgtcgttgttgtgcgagccgcccttgcggtcctcgaacgacgtgtcgtggaaacgcccgttgcgacggttgctgcggcgatcggcctcgcgaccgtcaaacggcgtgttgaaatcgtcgccgaagtcgttgccgcggcgcttcttgccgcccttgcgaccctcagcgtcacggcactgacgccggtcgtcaaaacggccgtcatcgaagccggagcgcccgtatccgtcgaaacggtcccgcttggtggtgtgcttgcgcttgccgtgcggcttgccctcgccgatgatcgacatctgcgattcgtcccgatggtcgaaccggtattgggcgctctcgcggccctccatttcggcgccgtcatgacgatggccgtcacggcgtgcggacggacgggagaaatcatgctcgccgccacgggcgcgggacttgcggccggaacgtccccgcccgccgcgcgcctcaccaccgcgaccgcccttgcgatcggagcggccggcgcgctcggaacggcgcaaagcctcaagcgccttgtccagcgaccagccctcgacgaccggcgcgtgctcgccgaccaactcggtcagatcttcggacgccggcgtgattgccaccgacttgactcggatgccggcgcgcttcatcatctggcgagtgctgcgggcctgattcggcaggacgagcgtcaccacgtcaccctgttcgccggcgcgcgcagtgcggccggaacgatgcaggaacgatttggggtcggccggcggatcggtctgcacgaccagcgtcacatcatggacgtcgatgccgcgagcggccacgtcggtggcaaccaatacgcgtaccaggcccttctcgaacgccaacaggttgcggtcacgctgcttctggctgaggttgccctgcagatcgaccgcgggaatgccctcgtcgatcagtttcttcgccatcttcttggcctggaacttggtgcgcgtgaacaggatgcgtttgccggtgccgctggccagcagacgaatcacctcatgcttgttgccctgcgacacttcgaacacgtgatgggtcatcgtgtcaacctgcgagacgacggaactgaccgcatgcactttcgcatccggcaggaaccgcttgaccagcgcgtccacgccgtggtcgagcgtcgccgagaacagcatacgctgaccgcgtgaatcggtctgctccagcagacgcgtgacgggcggcaggaatcccatgtcggccatctcgtcggcctcgtcgagaatcgtgatctccacggcatccagagacagcttgccctgacgcagcagatcctcaagacgtcccgggcaagcgacgacgatatcggcgcccgcacgaagccccgcgacctgacgggcgtagctcacgcctccatacacggtgacggtgctcatgccgtacgcctcggcgagcggctgaatcacctcgtcgatctggttgacgagctcacgggtcggcgcgagcaccagtccgcgcggacgcggcagtgacgcctgctcccgcgcggccttctcgtcggacgccttgcgaatctgctcgaattccttcatggccacttcggtgacgctgtgctcgctcaagcgggcgaccagcggaatggcgaatgcgagcgtcttgccggagccggtctgcccgcgaccgagcagatcgacgccgttcagcgaatcggcgagcgtgtccgcctgaatcgggaacgcggtgactttgccgtccatggcgagcacgtgcaccagcggcttgggcacgccgagctcggcgaacgtcggagcggcatcctgctccttgtcatctgcggaagcatcaagggcggcatcgatatcatctatatcaacagtgtccgtatcggtatgcataacggaacgcgcagcggaaccagccgcgaaatcatggtgacgtttcggcacaatagcctttcaacaacgaagccgatcacttacgcggcttctgacggagtgtccaccatatcagcaccccctccccaggatgccgggccggacgcggcgcggcgcggcggtttcgctattaccatgttatcgggccgccgatgacgtgccaatgcgcgccaatgccatatcgactcattgagagaggttcaacgatgaagaaaggactgtccccgacgacggggcgggtcatgctgctgtgctgcgcgatgctgtggggaggcagctatcccatagccaaggtcgcgatgggtgtcgtcacgccgcaatggctgatgggattgcggctggtcggcgcgtcgacgatcatgctgatcctgtttcgcaagcgaatcgtaccgtatctaaacaaatccatcatcatcccggggctggtgaccgggctcacgtattggggcacgatgatcagccagacggtcggcctgacgatgatcgaacccggccgcagcgcattcctgacctcggcgtattgcgtgctggtgccgttcgtctcatggctgctgatgcggcagcgtcctgcggcgcgcaacatcgtcgcggccgccctgtgcctgaccggcgtcggcttcgtgtcgctcgggtccgggctgggcgggctcacgattggcaccggcgacctgttgacgctgctgtgtgcggtgatcttttcgttcaatctggtgtgtctgggcaagtggagccgcgtcatcgacccggtggcgctgacgttcgcgcagttcgtgacggccggcgtgtgcttcatagtcggcgcgtcgttcagcgaaccggtgccgaacgcctcatggcttgcgccgggcgtcctcgcatgcctggtctacctgtttctcggcgcgacgatgctggctcagatcatgcagaacgtcgggctcaaggtgaccccgccttcgcaggcgtcgatcatcatgtgcctggagaccgtgttcagcatggtgttttcggtgctgttctatggagagactgtcagtggtgctgcggcgaccggattcgcgctgattttcctggcgatactggtgtcgcagatccggctcaacgggcgtctgctggagcgggtcggccgcaaggcgcggtagtggtgccaccacacggcaccacaccaccgcgcgacacgcccggagtgcgtagcacaatcatcgaatcgtcactggccatgcattgccattgcgccgttcttcgattcgcaccttgcgattgtgctacgcattccgggcgtgtcgcatgcaatcgtgcggtcatcggcgacgcagcttggcgagctgatagacctcgtcggaggccgcggcgacttcgggactgtgcacgcacttgccctcctcatgggcgagcgccatgatgtcgtcctgcgtggtcatgtcgagattaccggtcggctcgtcggcgaggacaatcgacggaccatagctcagcgcccgcgcgatggcgacgcgctgccggagtcgccgctcgtaccagtcgaaccggagccgcccgaatcagagctgctgcccggagcaccgcccatgtcggcgccgcgaccgaactgctcctcctggctggcggtctgggtctcctgcgaggagacgcagctggttcgacactggcaccgacgccacggccccgccggccacgccaagcgcgataccgcacatcgtcacgatcagcagctcgattgcgaactgcgccgccaccttgaccttcttcacgccgatggcggtgagtacgccgacctcgtatttgcgttcgcagatgttgaacagattgagcacgaccgcaccgaccgccagtacgacgatgagcagcgtgagggcgaacttggcgaggttgtcgagcggcacgaggctcgattcgtggttctccacgtcggcggactacacggtgtaggtgtcgtccagtccggccttccggacgtcggaagcgaaggtctcgtagtcgtcggcgctgccgagcacgtaggtgtagctcagctgggtcgtggtgttgttgtcatcgtcgttcgcggtggtgtcggcgtccaagccaagcgatttgagcgtggagacggatgtgtatatcgcgttgtcggcgtcctgcgaggtgccgcccatcgggcccatcgcgctggtgttgctggacgtgctgttcttgtagatgccgccgatggtgaacgtgtaggtcgtcgacgtgtcggacgggttggtgacggtgatctcgtcgccgaccttcaagtcgttgaagtcggcgagcgccttggagatgatgaccttgccattgtccgactcgccatagccgaacacttcgccggacgacatcgtgaacgtgccgttcgccgcgttggcgatggcggtgtccgacgagaagccggtgagcgtgaagtcgccagaggtcatcatcatgacgctaagagagaacgccacgaccgtcgaatcttgtctggctcttttctgaaaactctctgaacggagaaatgcgatattatgccggataccgtcgcattcgacggcttccgattcgtcacaggtaggttttcatcgccagatcaacggtgagtacgatgccggcgagcacagccgcgatgcgcatgatccgggccgggatcctgcgagtgacgggcgacgctatgtatccgccgatgaagcagccgatgcacagcaggatggccgcaggccagtccacgacgccgcgcacgatgaagatgaccgacgcgctgatgttcgcaccggtgccgatcagcgtcttgagcgcattgatctgatggaacggaccgatcttgcctgcgtcgagcaccgcgagcgcgcacgtgccggcaccggcgccgaaatatccgctgtataccgccacgaacgcgacgccgagccatatccaccatgggtccttggacatgggttgcgtcgatgcgagagccgacgcgggcgcgccgtcgctcccctgcccttgcggcgtcgtcagggatctggcctgggccatgacgtccgccgcggcctgccgcgcctgcatgcggccgcgcggattgaccgctatgatcagcgagctgaacaggatcagcggcggaacggcgaattcgaagatcttcgggtcgaggctgagcagcagcgcagcgccggcgacgcctcccaccgcgccgatgcttacgtaggtgatggaacgcagccgctgcccgcgcagctccttgcgggcgcccagcacgccaccgatgccggtgccgatcacgccgacggtattgctcgcgttggcgaggaccggcggaatacccagcgccagcagggccggatacgataccagcgaagacgcgccgaccgcatatcccacgaatccggcaccgatgccggccagcaggatcagcagcatcgtcatcagcgaaaaaccggcaatcaccaccgcatcaactccccgcatatatggacatcccgactcagggagaatacgtcaaagcggcacggcccgcagccgctcgtcaacatagcggacatgaatcacgatgcgcgacgcggtcgcacgatggcccgcgctacagcgatccgagtgctcaggcctccccgcgcggcaccgcgcccgacaaggacgccgcatgattggccacgcgcagttgcccgtaccccagcgcccgcgtgaaatggtgcgcgcacagaccattactttccgcaggattatggcatcccgcgatattgcaggtacgttccgacataacagcccccttccaccgcccccccatggatcacggtgatcttctctgaggcttctgatgtttttgtgggttagattgcgggttgtggcagtcggatgtcgagtccgccgcatctgggcatgaccagggcgatgaggttggtgacgcggtggaagccgtaggccatgcggacggtgaccttgatcctgttgctgaacgcctccgactgcccggcggtcagcctgtcggggtccttcaatacggcgcacccggcgccgcgcatgcgcctggccgcctccccgtcgccaccgcgcgggcgaccgccgtcacggcggcggtcattgcttcgtcgcgatcaccgacgtcgcggctgtcgcggcgaaccccttgagtacgtctgccatcacgtcacggtcctcggcgtcaatgccgcggacggcggcgagcatgaccggcaacgactgcgtccaatgcgaggtgagttcgccgaacgtgtcatacccaccggcctcgaggacggcgaacaggttctcgatgaaccggcggcgatgctcgtcatcgaacttcgccatccacccgttgatcgtgcgcgccagataccgggagctcgcggacaggccgccggcgtgcacgaactcgccgcgctcgacctgccagttcaacgcgaaatgctgcatgatgctgacgccgtcgctggagacgatcgtatagccgtcctccacatgctcgcgcatctcgaacagcatgccgacgatcgacgattccggcaccgacttgtcgacgagcggcgcgacccgcgcataaccgggagtatcgaaaaagtcggcgtcgaagcccggcccgtcatggcagaacacggcgataaggcgctcctgcaccgcggcaggcgcgtttgcggccgcatacaccgccagattgccgcctttggaatggccgccgaccatgagcgggccgtcccggcgccccgcgatgtcggccagataccgcgcggcggactcctgcgcggcgaccggacgacggaacgccatcgcgaaatcctccttccagccgacgatcgtgctgtcggtgccgcggaacgcgacgtacgatgagccgtcgccgacgtcgaacacgcaggcggagaactgcttggtggtctcggggtcgaactcgtccacgtagccgccgacgcgcagatcccgccagcgcgggctttcgcacatcgcccgcaacaggtcgacattcatcgacggcgaccacaccttgccgaacatgtcgtcatagcattccgcgcgcagcaggtccctgacgcccaccatggcgaggtcgacgtccgtcgcctccgcatcgagtctcggcacgttgacgggcatccgcgcgtatgacagctgcgcgagcgccagactgtcgacctcgttgaacggacggtcggcgaacgtgtcctcgttcgcgcggatgtcatcgacgatgttccccatggcggcctcccgtgatgccatcgattctacgcgctccccttcacacgcgacgccccggccgcctggcacgcgccgacacgcactacaatggtctggtcacgtcaacattacgcatgcatcccatgcacgccaagcggtttcaagcgcgaaggagagcactatgacgcacatcgacaccacctgtgtccagggcggataccagccgggcaacggggagtcccgcactcccccgatcatccaggccacgacgttcaagtacaggtcgagcgagcagatgagccggctgttcgacctgtccgaatccggctacttctacacccgtctgcagaacccgaccaacgacacggtcgccgccaagatctgcgagctcgaaggcggcgcggccgcgatgctcaccagctccggccaggcggcgaacttcttcgccctgttcaacatctgcaacgcgggcgaccatatcgtggcctcgtccgcgatctacggcggcacgttcaacctcatcaacgtgacgatgcgcaagatgggcatcgaatgcacgttcgtgagccccgactgcacgcccgaggagctggacgccgcgttccggccgaacaccaaggccgtgttcggcgaatccatctccaacccggcgctcatcgtgctggacttcgacaagttcaccgccgccgcgcacgaccacggcgtgccgatcatcgtcgacaacacgttccccacgccggtcaactgccgcccgttcgactacggcgtcgacatcgtcacgcacgcgaccaccaagtacatggacggccacggctcctgcgtgggcggcgcgatcgtcgactccggccgcttcgactggatggcccacgccgacaagttcccgggactgaccacgcccgacgactcgtaccacggcgtcacctacgccaccgacttcggcccggccgcctacatcatcaaggccaccgcgcagctcatgcgcgacttcggttccacgccggcgccgatcaactcgtggatcatgggcatgcacctggagtcgctggccgtgcgcatggaacgccattgcgccaacgcactcgccgtggcgaggttcctcgaagccgacccgcgcatctcatgggtgagctacccggggctggaaggcgaccgcaaccatgcgctggccgccaagtacatgccgaacggcacgtgcggcgtgatctccttcggcgtgcccggcgggcgtgacacggtttcctcgctgctcgaccatttccggatgatctcgatcgccacgcacgtggcggacgcgcgcagctgcacgctctacccggcaggcaccacccaccgccagctcaccgaggagcagcttgaggaggccggcgtcggcatcgacctggtacgcctgagctgcggcatcgaaaacgccgatgacatcatcgccgacctcaggcaggccatggacgccgtgctctgatcaatcatcgatttcgctcagccggctcgcaaaatcattctcggacacgctctcccggatccgcttcgcgagccggcaccagccagcggggaagcccaatcacgtcagccgacgtagcgctcgaagcggtggaagccggtgatgcggtcgatctcggccatggcgtcgacggggatctggaagccggatgccttgaggttgttctccagctggccgggcttgctcgccccggcgatcacgcagctgatttcaggatgctgcaggatccatgccatcgacaggaccggcaggttcgtgccaagctcgtcggcgacgccgctcagccgctccaccatgtccaggttctcatcggtgagcaggtcgttgatctggtgatccgcctgccatgtggcacgcgacccggccggcagcggctgaaccacagtgatcgggtacagaatgacgcttcagcatgccgccgaccaccgtgcccgacacggcgccgagcaccgcgccgggcaacagggcgagcgctcccagcaccgtgccggcggtgaagatcgcgatcgccatgatgaacagggtcttcgtggcgaacttgcgcaccatgaacggcgagctggggatcgacaccgacagcaacagcaggtagccggtggtcagccattgcacgaccgatgcgctgatcgagaattcctccatcagtgtggattaggcgatgttcagcgacgcttccgacaggatgccgaggaacgtcaggatagccaaagacaccacgacgatgacgagtttcgtggtgaccggctctttgccgccgtgaggcaggcgtgcggttgatgcgctcattgtgtcctttccttgatttccggtacccggatgcggccggatgcgtggcggatgggctgcggccgcgggaccgggacggccgtcagctcggctaccggcgttcggcgtcgtcctgcatcagcgccaacgcacgtcgcagcgtgcgcaccgtgatgtcgcattcccgtgcggtgccggccgactgcccgttgggttcgttgagtagatgacaccgttctcagcacaggagcggcaggtgatgcacgatccggcacgtcaccccgtaaagcccggcatacagggtacatacaccaggcaaaacacgcccggcagaatggtcataccggctcgataccatatctgccatacttacccaccatcaaacatcacaggagatctcatgaccacgctagccattgatatcggaggaaccaaaatcgccgcagccgtatgcgatgaaaacgatgccatcacacatcgctggcgcgttcccacaccgatggacgccgacgccatcaaccaccacatcgccaacatctaccatgaggccgtcgccgccggccacgacgacatccaggccatcggcatctccgcggccggcaacgtcggcgcggaccgccgcaccctcaccttcgccgcgaacatccccgcgtggatcaactacgacctgtccgagcacatcggcgcgctcatcgaccatgccgtgccggtcgtcgtcgagaacgacgccaactgcgccggctggggcgaatacgtgcacggtgcgggccagggcagctcgaacatggtcgcgctgaccgtaggtaccggactgggcggagcaatcgtcatcgacgggcggctgtaccgcggatcgttcggcatggccgcggaactcggacacctgccgatggtgccggacggcgacacctgcggatgcgggcttcgcggctgcgcggaacgctacacgtctggaagcgcgctggaacggttcgccaagtccgccgtgcgccgacgcccgcaggacgccgaacgcctgatggagttgtgcggcggcgacgtcgacaagctcgaaggcccgatggtctcgcaggccgcacaggagggcgacgtgctcggcctgtacgccttcggcaaaatcggcgaatggctcggccgcgcgatggccgccaccgccgcggtgctcgacccggacgtcttcgtgatcggcggtggcgtagtggcggtcggcgacatcctgctggagccggcgcgatacaactaccagcggttcctggagggcagcgcataccgtggccacgcgagcatcgtcgccgccaccgccgggcaggacgccggcctgatcggcgccgccaacctggcactgcgctaagatgcgcgatgagagatgacgatcagacgcaatcgcgacgcgtgcaacatcccaacatggaccgcacgcgggcttacgggttctgatacgtgcacaactcccgcgaaacggcataatgcacgcgttgtccaacgccagacgtgtacaacagtgcatgacaacgatttcatccactgttgtacaccgaccgcaattccagaaacgttggaattccaacaagacacacatctacatgcataggtctcccaaggcgcctcgtgcacaactgccgcattcgcccgatatgcgcacgttgtacacgaggtccccttcgaaacgacctccggaccgaatcacgtccctttcatctccacctctcgcatgaagccgaacgcgatgcctgccgttatgcgagatttgcaccggacacggatcacagatcccgtttaccttgaccgacaacggccgacaccctaagacaatgcgcgttcgcggtgggaaatgccacgaaatgtcgaaaacgtgggttcttgccggttcgtggcatgaaatatccgacttgtctcattgcttgaaacaaaggataccgaatactagacaagtcagtaattgggcctcccatgcagttctattcgcgtcccggaaaaatcttgcacgatacaacaagaaaattgccgaatcaccagcagcgttcgagcatcgccgtatcctccctcgccacaccctccggcccagccgcatcacagcatgtggtagtcttgctgtcgttcatattgggcggcattccgatatgccaggaaagccgcgttgcaaaggtagtatcgttttgatttctcgatgagcgtcgccgagtggcttcatgagcgaagccgtgcctcggcgtacgcgatcgcaactcacaccaatcacagatccgcaaaccgcatcggcaagattgcgccgatccggtttctgcatccgcgctttatgtgaattcccccccccatttcatcgagaacaaggaacccaatgatacctgcactgaccctgacgaacatcgttttcacttatccgggcacatcggagccgctgcttgacggcatcgacgtcactttcgcacgcggatggaccgccgtgctcggcgacaacggcatcggcaagacgacgctggccaagctcgcgatcggccggctctcgccagatgccgggcgcatatcgccgactccgaaccgcctgcataccggttactgcccacaaaacaccgacgaaacaccggagaatctggaggacttcgcctgcgactggtcaccgcaagccatggagatacgccgtgaactgggcatcggcgacgactggccttggcggcccggcaccctgtcgggcggcgaggcgaaacgcctgcagatcgcatgtgcgttggcgaccgatcccgacgtgctggtgctggacgagccgacgaaccacgtagaccggccgacccgcgagcgcatcatcgcggcattgcgctcgtatgacggcatcggcatcctcgtctcgcacgacgtggccttgattgacgcggtggcgagcagctgcgcgttgttcgaacgagatcatgtgcgcggtcgtaacatcaccgtggtgcgcgtgcggccgggaaactactccgcggcatccatggatgcgcaacgggagcgggcggcggcggcaggcatggcgcgcgacgcccggcgcgaatccacgcgcatcgacgcggtcaaggagcagcgccgacgggcggcgacgagcgagatagccggcgcgcccaaagcgcaccggctcgtgaatccgaaagaccatgacgcgcgcagccgcatcaagaaaagccataaccccagccgactcggccccgcgagcgcccgcatcgacgcacaggtggccgccgcccgggaacgggccgcagccgtcgtcaccgccacgaagcgctatgacggagacatctggatggatgccgaatcaagcaaccgacgggagcttgtgcggctggagccccagatcatcccgtacgcgccgcaatcgccggatggagtcggcgcggcagcgatatcggagacagcgggcctgaagataccgatgctaaccgtcggaccgcatgaccggatcggcatcagcgggccgaacggcaccggcaagaccacgctggttcgcacgctgctgcgcacgatcgcgatgcgggaacagtattccggcgtcccgctcccccggctgacgatcacgcagaacacgacggatcaggatgccagggaggcgatgcgccggctcacggcgttgacgcccatcgaccgcggtgacgtattgtcggcattcgcgcagctcaacgtcgacccaagccgcctcctcgccggcggcaacccgtcgccgggcgaattgcgcaagctgctgctgtgcttgggattgcgagatcacccgcatctgatcgtgatggacgagccgaccaaccatctggatctgcattcgattcaggcgctggcccacgcgctggccggataccccggcgcgctgctgctcgtctctcacgacgagggattcctggagtgcgccgcatccatccgctggacgctgcattcggacggcctcggcggcgcgcaactaacggtcagttgacgccaccatgaccagcgtcttggccttgacccatctgagcaggaagccgacgcatggcagcgccacgccgatggccagcatatagccgacgaccatccattgggcggtgccggatgacacggagaactcgtccaccagatcgggcagcgcgatgttcatcgacgtttccgacagcatgcccaggaacgcgccgatgtacagtcccagcatcaccttgtgcggatgcctgaatttcggggattcggcaggaatatcatgtgcggagccgtgttctgcggccgcatgttcttgcagggttgtttctttcgaagttgtctggatcgcggacaacatgacctctcttgtactcttcccgtcaccgtcgagcgagcggcgcgcgcggccgggccctgcgtacacgtcgagaagtccctaacgtccggacctgcgacggcaacgaaaaaccgcatgactggcatcgggcgagccgattcgacgaatgccatgcggttttgaaacagccgtcaccgtagcacgatttgcaaatccgcataagtcgcatccgcgtatcgtgcgcgtatcatgctggtagaggacgcggcgaatcctcgctcgcgccagaccgagcggcgacaggaaagggagaccatgcagcatttcacccaggtcatcgacggcatcgacggctcgcgggccgaactcgtcggctatgtgatcgacaacagcccggagatggacccggaccggcgccggccggcgatcctgatcattcccggcggcgggtacgctatcgggtccgaccgtgaatccgaaccggtcgcgctgcaattcctcgcggccggctatcaggcgttcgtactgaaatactcctgcgtgccaagccggtacccggtggcgttgctggagatggccgaggcgatgtcgatgattcgcgggcatgccgacgaatggcatgtggatgccgggcgcgtggcggccatcgggttttcggccggtggtcatctcgccgcgaacctgacgacggtttccagcgatgccgagctgcgcgacgccggatatgatccggctgccgtgcgcccggacgcgctgctgttgtgctatccggtaatcacgtctggccggttcgcgcaccgcggcagtttcgacaacctgctgggtgacggcaaagacgatgcgtcgctgctggagctgctgtcgatcgagaagcatgtcgacgcgaccatgccgccggtgttcatctggcacaccatcaccgatcaggccgttcctgtggagaattcactgttgatgatccaggcgtgccgtgacgccggggtcagtatcgaggcgcacctgttcccgcagggcgggcatggactgtcgctcgccaccgtggacaccgcgcgtgccggctcgccgggcgagggtgacctcaacaacgtcgtgccggcagtgcagatctggccgcggctcgccttcgactggctccgccgcacgttcgacgtgaggtaaaggctgctgtcggaggttcacaggcccattcgcgcatatcccgcgcctgtgccttggctgtgcgccgtcaccgtgcgtgggttattgcgtcactgtgcgagggtaccgtcaccgtgcgcgccctcacgcacagtgacacatcaagaaaatccctgttttccaatgctttccgggtaccgtcacgctgcgtgtgccctcgcagcgtgacggtacccgcgcacagtgacgccgcggaacagcccattggcagcaaccacggccggcaacttggcagtgtcactcaccggcagcttgacgccgcgcgttccgcggctcaggcttggcgtggatcttcgcggtgagatggcgcacttcgatcttccataccgtgacgctgcgcacctgctgatcggtgaactctatatccggcatgcccgcctgctgccccatcagcagccgcagccctttgcggcactcgtccaggtcgtcgatcatgctggccacgccgttgccgatcaccgacttgaacgcctcgccccagttgcacggggtgcggccggcgatgacctcacaatcggtctccatcgagaacgccacatccaacgcgtttcccgcagcccggatcgcgtcgagtttgcggccgatcgacgccgagtggatgtacagggtcaatccggccagttcgtcgccggtgccggcgtccccatcctgctgccattcgtatccgaaattcagcggcacgatcgtaagtccctcggcatccgcatagcccacatgcacgatacggcatgcggcgacgattccctcgatctgttcgcaatcggtcacctcgcgatcggcgcggcgcatcatgcgatgccgccctgcgaccgtgcgctcgttattgcgtcgcgtcggatgcgcttcatccagtcccgtcatcgccatcactccttgtgctgacccgagtttgatttgatgatactcccgttccatgacccgtaattgaagatggaatcagccgcagtgcggagaaaaaactgagcagaaaaagaaaaagcgaccccggccggacttgaaccggtgacctccgccgtgacagggcggcgctctaaccaactgagctacggggccgttcgtgccgtcatcgggcacaagagaatataatacaggactactcgaccacgggcgtgtcgcggccaagcgcccgataaagaccggtcgcacacggcaaccggtcaatgcccggccgggcgagcgcacagtacggccacaaatgcgccttggtaacggctatgaactcccggatgaacgccgtgggccagtagtagccacgcgtatggctgccgcccccatccgccttcagcccgatatgatgcgcgtattcgctggctcggaacacatggtaatcgctggtgaccagcgcgcaacggtaggcgaggccacggcgcccggggaccgattgcacgccgctgcgcgcatccatgatctccttcgaaaaacgaagattctccatggtcgtggtggaacggtcctccatgagcaccgcgtcggcgggaacatgacggctttccgtcaggtaccgccgcatcgactcggcttcggacaccacttcatcgttcccctgtccgccggcggcgacgaacacgcccgtcttgccctgcttctcccacaatggccgccgccagcagcgccgccaacgacgccaacgtcatgccgaaattcattccggtcttccccaccagtcatcgtcttctcgacgatgcgctgagacccgtcactataccgcggaacctgcggccgtaccacttacgccggcagccatccaccaccgtctcttcccccggcatgtgcgatgccctataatcgtagatttgccctattcacacgcctcgggcacaccgccgcgacctcatgcgtgtacagtacaggaaggatttccatatggaaccgaattatctcgtgttgctgggaatcgtcatcgtgatcatagagttcgccctcaagctcgatgcgatcctgatcatcatcgtgtccgccgtggcgactgcgctcgtcggcggcatcattcccaagggcaacgtcacgatcggcatcatcgtgttcggcgtgggcatgatgctgttcacgatgatcatgggcaacgcgttcgccgcgatcaccgtgatgaccgtgggcatcggcgcgccattcgtgctcgcctatggcggccaacttcaacatcgtgcccgttgcgatgctcgacatgaaggaccgcatgggcgtgatcaagaagcaggtgctgccggcgatggtgatgatcgtcgtgcagatcgtgtacatgctcatcgcccagtgacaccgtattccatccatatatttcaagcaaaggagccattatgagcaagatcctggtcaccggattcgatccgttcggcggcgagccggtcaatcccgcattcgaagcggtcaagctgctgcccgaatccatcgcgggcgtgagcgtcgtcaaattggagattccgaccgtgttcacgcgcagcgccatggtggtcgaggaggccatcgaacgcgagaagcccgattacgtgctgtgcatcggtcaggccggaggccgttcggccgtgaccgtggagaaggtcgcgatcaatctggccgaagcccgcatccccgacaacgacggcgagcagccattcgacaccccgctgcgcgaggatggcgacaccgcgtatttcgccacgctgccggtcaaggccatggtcaagcgcatcaacgcgagcggcatcccggcgctcatgtcgtacacggctggcacctacgtgtgcaacagcatcatgtacaacgtgctgtacctgctcgaccgcaggttccccggagtcaagggcggcttcatccacgtgccgtacgcgaccgcgcagggcgtgggcaagccgaacggcacgcccaccatggaaatcacgacaatggccaaggccatcgaggccgcgatcgaagccgcagtgagcgtcgaggaggatgccaccgacatcatgggcgaaacccactaatcacgcccacccgtcgaaaaacactgacatatcagcccgccgacgagcccgctcatgggttcgtcggcacactgcagacggaccgaatcacttatcgggaagccggccgtcgggatcgtgcacgatccattcgccgctgggatccacggcgaccgtcgggtgaggaaacacctggtcgaacaggttcgcatttattgttcagatgggtcagccttcgtgatcgttgctatttcaacgtttccttggcgtgtccgctgacacaaaagtgtgtcgggaaccaacccggtggttcccgagcgttttgtgtcaagactgtgtcacctgttgtgtcatcaatcagtcggattccattcagatgatcatgcaattcactgcgttcggaacggatgacactagacacatgtcctggcccgcagctccgctgattcacgtcaacacagtaagcatcaatgcatacctatcccattcagccacgggcacagcctactcaacagaccaatccccgaaccaacggcgaaaccgaaacaagcttcaatcaaaatcagaaacctcatcgtttcaccccagaccagaaaccatcgttggcccacccgtgaccatcaccgcctcccttgaatccagagaacggattgacatcatcacacaagaccagtaaactaggcttgctttctcttagcaataaggaaggctccaagccgccgggggtattcccccggcacttctttttcatccggggaggccggcgatgcgcgagttgagcatcatggtcgacgagtccggcgaatggggcaaactctccaagtactatctcatcacgctcgtgttccatgaccagtcagaaccggtcatgccccacatcgaacgctatgagcaacacctcgcggatgcctcactgccagacattcccttccacgcaggaccattgctcaacgggcacgccgactacgagaccctcagcatggccgaccgcaagcgcctgttcgtcgcgttcttcaccctcgcacggaatctgcccttcacctacgtgacgttcgcacaccgcaaaagcgagttcgacaacgacaaacgtcgtttcgaggctcagctgcggcgagacctggcgaactatctgctgacacacctcgacagattccagtcgtacgacaccatcaagatctattacgacaacggacagcaggtcgttaccaacgcgttgaaggcatccatcggctatgcactctccaaggaagcggtcatctaccgcaaagccgaccctaaagactaccgcctcgaacaagcagccgatctcatgtgcaccatcgaattgaccgcgctgaaattcaaagccggagaaaacaccgaaaccgatcacaaaatgttcggagactggcgctcattcaaacagaactacctcaaagcgttacgccgcaaacaagcaaaataaccgccatatcccgcatcgtttccaacagacgcttgcataaaaacactcagcccgcatacgacgaaagggtgggcatgccatgaaaggacatgcccacccctgatgtcagtggttcggcaaaccggctacgtgtttagcagcggatcctcctcaccgctgtaaaaccggcacccagcacggccagggcgaccagcgcaccggccacgaccgcacgtcaacgccggtcttggccaacccctgcttcttgccatcgttcttggaatcggccttcttgtcacttgcagacggcctggttgcagccggtttgttgctgtcggacggcttgtcgttgtcgccattgtccggcttgcttggcttcgagggaacggtctccgctttcttcaacccggactgcgcgtcagccaaggccttcacggcagcatccacgtcagcctgggacgcatcctgcttaccggcgacagtcttcgcgtcggccagcgccttcgcgaacggagcccaggaatccttggtgtaatccttctcagccagcttggcggcgtcacccacggccgtgttcagcttggacttgtcaaccggagtcggagtgggagaagtgtcgcccacggtcaccggggtccacgcctgcgcggtgccgttttcgtcctgaacgctgatcttgtgctcgccgtcaggcaggttggaggggatcagcgcgtcgaagtagtacttgccggtcttctcctccttcttcaccgtcacgaacggggcgccgcccgggccggtcaacgcctgaggggtggaatagatgtacgcgtaccagaacaggctgttcgcatccgccttgcccttcgcctcatccttcaggttatcgatgtacacgcgggcggttttgcccggctcgaccttgccaccggcaaccgcagccttcacgtcagtcttatcaggcaacgtctcagcaggcttcgcagccgcgacggacttcgtcgtgaaatcagggacgaacttcaacgcgttctcgttgtcctccacccaatggctcaccttggtattggaatccttgtagatgggctgcgcgtacagcgcgacttgccggatatccaccggggtcttcacatgcacgccattacgcagcaattcgttcgacgtgtcctgaacgacttcctgataggggtacgaaggaaaatcagagccctttgcgttgttcgtatacgcggtgttgggagtcaagccaatcaatgggaaaccaaaactgccggaagccttgccattccaggagttcttgttgaaatacctggcgaaccattggccagaggccttgaaagccaccttgctcccatcagtcgataggtcattgtcgttaaagacgcccttgtactccttatcgccatggaagccatagatgctgtcgtacgagcctgcggtcagctcatcatcggaaacgcccgtgctgcatatgggaatccagtacccccgatggtattcgcacttgagtgcgccttctctatcggggtgatgtcggtgatacgctgcacctcgatagagaagcacacgtccttgatctcgtccacctgcgcagggtcgatcttgtagtcgaacgacacgttcgccgtctgcgctcccacatccgacaccctcacgttggacgacgtgatcggattgtccttattcgttacatccgccgcgttcgcagtggcgacgcccccgaacaatgtgcatgcggccacggccaacgccgccatggcctttccgaaacgcctcacgacattccctttcccccaggtcccccgggattctcatcgaaggacgacgggcaaccccgcctccataccctgaaaacgctagccccccgtggcctcattctgacggcgtcaggacacgccgcatgcgcgcgttcgcgctgttgcgccatgacgatggcgtatgggataatccacaaggtgcttttgcgtggaccggaacggccgtggcgacacggaaaacggacgggcggatgacacgaatgactgccgtccgggacaccccccgaaaccggttgtgtcattaccggatcagggtcccgcaaaacgttggaatttcaacgtttagtgaatggttaggtattatatggctgagtttattgttcagatgggtcagccttcgtgatcgttgctatttcaacgtttccttggcgtgtccgctggcacaaaagtgtgtcatggtcggcttggatcgtcacttgtgtcaagtttgtgtcatctgtcgctaatccgagacccagcattgctagaatcgatgtaagcgatgccgacgcgacggcattccacaccacggaagattcattcactttcgatgaggcaaggaggcgagacatgacgaagctcgaacgcagccagatcgatttctccacgtttatgctgtatcggctcgccgagcattggggcaagtccgtgcccgacacctatcgcattctcgataaggccaacgctatcgacggctaccttgtcccctgctacgacatgctgcacacactcggcagcgaatacctcgtcaacgacctgacggactacgtgcgcgagcagggaatctgcatatgaggctgtaccacggttccgacgtcacaatcgaaaagcccgacgccatccactcacgcaagaacctcgatttcggctcggggttctacgccaccagttatccgaagcaggcggaacgctgggccttgcgacgttcattgcgctcgcatggcaaagcgctggtcaacgtgtacgaattcgacgaaacggcgaatctccatattctgcgtttcaacgagaacgacgccgaatgggttcgattcgtatgcaactgtcgtcggggcggacagcctcccctgggaactgacctcatcatcggaggcgttgcggatgacaaggtctacgcggccatagacatgtacatgcgtgagctatgggacatggaacgcaccctgcaggccctagccttctacgaacgaaacgaccagtactgcttcctcacaccccggtcgatcgcagccctgcgatacgtcgagacctacgaggtggaacaatgacgatcacgccacaaacactgacgaagctcgaaacgctacgcaaggagcatctcgaatccgatctcatcgcgctgatagccgaccaatacgacatgacagccgccgatgcgatgaaactctattattccagccaactcagccaacaggtggccgacggctcctacggcatcgaacaactcgacgcgcgctacctactcgacgaccttcaacgatacgagccgcaactcttcagaaccgtcaacgcgactgaatagggcacggctgccgagttccgacacgagcaccctcgcatcccatcacattctgcagcgacgcggtgtggacgacaaggcaacagctcgtcccgttactcggacgcggcatcacgacgatcagcaaacacatcggcaatgccaagcgtgaggaattggacggaatcgccccccccagcggcacaacccacgagctacatctcgcctactcccctgcgtcgggatcgtatctgagaatgtcgcccggctcgcattccaaggccgggcagcggcatgaaccgcaatcagcgcgatgggatgcgccgacaccaactgacatcactcttgaggcatctggtacgagtatttcacccgcaatgtttgatagtcgcccttgctgagacggtatccgacattgggctgctcctgatattccccgtccatgagatgactgaatcggacaccggtcgccaatggttcggcaggaggcttggtaatccgggcgaacatctgttccagaggcccgaggtcgttcgaccgcatggcggcgatggaggccgggtcattctcgcgtctgccgaccaatccccagtcgaaatgccatccggcgtcacgggccacgacgtcccagaacactcgttgggcgcggccgttgccctcacggaacgggtggaggatgttgaaattgttgtagcttacgctcaaccgtcgatgaacgtctcaaacggcaatccccgcaacaggttgtcctctcgcagcatccgttcgctgtagatcactcccatgtcgaagagctccagcggctggaacggctctccatcacccttcgccatgtcgatgacacgaatctcgccggcccagtcatacacatcccggaacaactggcgatgaatccactgcaactgcgcaagcgtgccctcggccttcggaaggcttcgatgcagctcgatggaacgcgccgttcacagatcgttctcgacggtggccaattccacggcactcgacgcaccggccagattcctcagcacatcggtgccgggaatcagagagggatcatgcgcggcgcggaggtacgtcatgccgcgtccagaccatagcgtcgccgggtgcgggccaccaactcggcgggatcgatcaagcctctcgcataatccctggcgtcatccatgaaagcgacggaaacggcaccgccctccatctgcgtggaatgaacagccaaggcaacatcctctacccgatcattgagccaatcgcccgacaccgcacccacctcattccacagtcacggtcaccgttatgttccattgtatggcgcgcacaggcagcacaagattccgctaggggcattcctccggcttttcttttctcctatgcgtagaactgctggcagaatttctgagatgccaatcgggaccgaacctcggtctgccattccccggacgacgcgagcaggtccggcaatcgttttccgaacacgtcttcgatttcctcgcgcgtgaaggagtagccgtcgccgacgaagttgtaggtgatgtccgacaggttggggatggatgccatggacacgaccgagttgtagatcaggtcccgccacacgtcatcgaccccgatatccccaaccacttcaaggtagttgatcgtcagagactcatgctccgcgtcgatctcgtatttcctgtccacactatgcagaggcagcgcgccgaaaagctcgcgaacgccgttattgtcgcccagggagatgggaccaagctgcgcgatcggtgtgacgtcatgcgtcagggcgtcatcctgctcccgcgcatattccgcgttcgcctggttctccgaggcaatctgaaacgcggcacagaacagaacgacgacaaccgcgagcacgccgacgatggtcatggttttcttgttcaccgttctcatgatttctccctcgactcttcacaggaacctcgactcgtcacaggcacccttcgacgatgtaatccaattataaccacgggattcccgttgtccgacactgattggcgatgggattcgaccctgatgtttatcggtatcgaaaccatgggtccggcttgcccgcatggtcggtgacatcccgctgtccgtgggcgcggtcgtcgtcggcttcgcggtcaggaagttcatggacggggccgaacggtcccggcgggaactgggcgtggctttgctggacgtggacatgcccgtcctcgacgggccggcgaccgcgaaggagatggccgggctctacccgtcggtcgcggtgatgatgctcaccgtgttcgaacacgaggaatcgctcgccaaatcactggccttgaacgtgcgcggattcctgaccaaggacatcccctccgcataactcgtccaactgatcaaacaggcacacgcgggatgcacggtgttcggaccgcgcccgaccagtattctcgccgacagctatctatactccggaagaaacgaccccggatacgacgccttccgcgaccgagtggagcgtctcccgaaccacctgcgcgccacgttcgacctgctcatccaggcgctgccgaacaagaccatcgccaaacggctcggcctgagcgaggccaccgtgcgctcctacatatccgagatcttcgccgcactcggatacaccaaccgcggcgaactcaccatcaccgccatcaaggccggatactgaaccacccatgtaaacgccctcggcccacgcaaaaacgcgtaaacccgattgcagatccaccgttgcggcatgacgatgggatatgggataatccacaaggtgcttttgcgtaggaccaaggcgccggcgatgacacgggacaaccacaacagcgaatgacgcacaacgggccgtccgggacacccccgtaaacggtcgcgtcgttttccattggtgtcattacggggtccgggtcccgcaaaacgttggaacttcaacgtttagtgaatggttaggtattatatggcagaattcgtatatcagatgatcaaggctcgcaaggcgtacggcgaccgtgtgatcctcgacgacgtgaccctgagcttcctgccgggcgcgaagatcggcgtggtcggcccgaacggcatgggcaagtcgacgctgctgaagatcatggccggactggagaccgtcagcaatggcgaggcctacatcacaccgggcttcacggtcggcatccttcagcaggagccgccgctggacgacaccaagaccgtgggcgagaacatcaagatggcgttcggcccgatcgccgagaaggtcgcgcgtttcaacgccatcggcgaggagatggccaacccggacgccgatttcgacgcgctgatggacgagatgggcaagctgcagaccgagatcgacgcggccaacggctgggatctcgactcacagctcgaacaggccatggacgcgctgcagtgccccgacatggacaccccggtctccgtgtgctccggtggcgagcgtcgccgtgtggcgttgtgcaagctgctgctcgaagcccccgacctgctgctgctcgacgagcccaccaaccacctcgacgctgagtcgattctgtggctggagcagttcctgcaccagtacaagggcgccgtcatcgccgtcacccacgaccgttacttcatggacaacgtggccgaatggatctgcgaggtcgaccgcggccacctgtacccgtacaagggcaactactccacgtacctggagacgaaggcgaagcgtctggagatccagggcgccaaggacgccaagctcgccaagcgcctcaagaacgagctcgaatgggtgcgcagctcgcccaaggcccgtcaggccaagaacaaggcgcgtctggagcgttacgaccagatggagaacgaggcgcgcaacaacaagaagctcgacttctccgagatccagattccggccggcccgcgtctgggctccgtggtgctggaggccgagcacctgcacaaggctttcggcgaccgcgtgctcatcgacgacctgtccttcacgctgccgcgcaacggcatcgtcggcgtgataggtccgaacggcgtcggcaagtccacgctgttcaagaccatcgtcggtctggagccgctgacatccggcgagctgaagatcggcgacaccgtgaagatcagctatgtcgaccagaaccgtgaaggcctcgacccgaacaagaacctgtgggaggctgtctccggcggactcgacttcatcgaggtggccggcgtcgaagtgccgacccgcgcctatgtggcgagcttcggattcaagggctccgaccagcagaagctgaccggcgtgctctccggcggtgagcgcaaccgactgaacctggccctgaccctgaagcagggcggtaacctgctgctgctcgacgagcccaccaacgatctggacgtcgagacgctggaatcccttgaaaacgcgctgctcggcttccccggctgcgccgtggtcatctcccacgatcgttggttcctcgaccgcatcgccacgcacatcctggcgtgggagggcgatgacgagaacccggccaagtggtactggttcgaaggcaacttccaggcctaccaggagaatcgtgtcgcccgcctcggcgaggacgcggcacgcccgcaccgcctgcacaagaagctgacccgcgtgtgacacttgattaagtcatgaagaagcccccgcaagggggcttctcgcgttttcggcccctcgccaaatatcctcccgctggcgggaggtgacgcgcagcgccggggggggggcgagaccatggcgcataacatatacgaggaggcccctcacggttggtgaggggcctcctgtggctattgatcggtcagaaccgatcagcgtcagcggacgctgcggcgacgaaccgcgacgaccgcaccgccggccagcgcgaacagagccgcgatggtggcgagcaccgccgtgtcggcgccggtggcgctgagcttgccgtcgttcggcttcgtggtcggcttctccgtacccggtttggtcggctcggtcgggccagtcgggccgggcacctcagagtcctcggtgacggtgacggtcacagaggcggacttgccgttcgccgtggtcgcggtcaccttcgccacgcccttcgcgacggcggtcaccttgccggtcttgtcgaccgtcacgaccttgtcatcgctggaggcccacgtcaccgcctggtccgcgtcatccggcgcgaccttcgcggtcagctgcgcggtggtgcccttcttcagcgacagcgcgccattggcaacaccatcgccagaaacggtcacacccgtagcctccggagtctccgtcacctcggggttgtccttcggctgctcgggctcggtgagctcgaccggagtggccttggccgtcgcagccagctcggcgacagccgcccaggtgacgcctgcgctggtttcggtgaggccccatgcgtcgttgatctggaacttgacgtacacgtcaccggacggaatggtattcggcagcgcgatggtctgcagttccttggtgtacgggaactcagccgtggcgacgggttcaccccagttggtgacatcggcaacgctgttggcgtcgctggccgccaccacgtacactgcgacgttcttggccgggccgttcagcttgtcctgacggtacaggtgggtgatggccgcaatcttgttgccctcgccgggcgacgccttgaacgccagccagtgcggaagattggcgctggggttggagtacttgctgtgccagaacgtgtttgcgttcttgtcgaaggcgttgcccacgggagcatgctcgccggtggtctcctgagagctcgccgcgtagtcgcttgcttccacgtccttggtcaggctgccggtcagcgccacgctggtggtgccgagctcttcaccggtcttggtgttggtgagcttgaactgcacggtggcgtcgcccgtcccagtggtgttgaccacgttgaagtaggcgatggcggccttgccggccggaatcgacttgaggctgacgcttccgggcttgatctcccagccttccggcacgaccggggtgacggtgacgtcaccggtgttcgcgttggatgcggccctcaccttgacggtgatcttggacggggaggccgggttcacggtcttggagtccacggtggcggacatgcccatgtggccggtgagcgtgaacagcgcgttgtcgctgaccaggtcagccgggaactgagcgacggtgccagcggcgggacgatgggtctccagatcgatgttctgctcgttgccggtggcgatggcgagacgctgctgcgtcagcgccggggaaatggtgtacttgccatccttgtcggcgcggatctgccacttctgcgtgttacgctcattggcggtgtcgcgctgatcctgaccgacggacacgtcggcgcagttgcgcagttccggcgtcgcgccgacctgggtgacgacatcgagatgcttgcttccggtgaagagcgcaagacactttccggacactgtatccttcatctggtagtagccgtcaggcgtggtgatgagctcccacggacctttggagatcgacttcaactgggggatgtcgtagatgccggcatcgaccggggtgtagtcgtattcgcggatgtccagcgggtagccgatcttgtcgatgtccgccttcatatcgttccacgtcgcccacgggcgggaatcggaccaggtcatctgtgagatgaagcgcatgccgtcgaagatctccttctcgacctcgttctcggtctggtagatcgagctgtcgggccagatggacaccttcgcaccggtcagtttgtcgtagttcttgtcgatctgtcgtccgccgtcaaaggttccgacgttccagttgttgttgtacagtcttgcggcgttgaccttgtacacttgcgccgaacgggaccagtacagggcctgggtcgcgttcatcaacgtgtatccgtcctggacgagctcctgcggcttgcggccggcaccataccagtattcgatgacgatgtccttgttcagggagacgttcttggtgttgacgatgccgtcgttccagatgcgcagctgcttgcccttggccttgacgtatttatctatgtcgttgatgaagccggtgaacgcatcattcggtgtcgcgccggctccgtactgcttttcggcgaacgtcttcaacttgctgtagttgtcgaagctggtgccgatcatgtactcatcggcgcccatgtgccagtatttcgtggtgaatacgccgtcgtattcgtcaatcagcgtcttgtagaacttcacggcctccgggttggagatgtcgagcttgttgggatccttccggcccgagttgtcggcaagctggtactccgggtagttctccagccagatgttcatgtggcccggggagttaatctccggaatcacgtcgatgccgtagctattcgccttcttgacgaacttcttgacgtcgtcgcgcgtgtagtacgaccatgtggcggccttcttggtgttgtcctcttccggcttgagcttcatctccagcagcacgtagttgaggcgcaggtcggccatgtccgacaggaaacggtcgatccagtcagtggagatgttgatctggcaggcgcacagcgtagcgccgcgctccttgtacttcggcttcgtggcgaccgtgccggcgggcagggtcagctggccctggcgaagcatctgcgagacggaacgggtgccgtagaacacgccgatgtcggtcgcgccgatgacctcaaggcccttcgagccgatgttcagcttgaatccctcatcacccagttcggccttcttcgatgcatccaacgtgagcgagatgtctttgcccgtcgctgaaccggtcgcggccttgatgtccacgtcggtgaacttggtcagctcggatgccaggctctgcgcacgcgcggccagtgcatcgctcgacacgacgcgggtgccttcacccagcgtccatgcgccggtgccgtcggtccagccgtccatgctcgggacggtggccgggcgggtgagattcacgggagccgtggcactgtacccggctgcactatcgtcggcggcgctggccgtcatcgcggtgcacatgccaccgaccatcaggccggctacaatggccgcaacggtacgcacaccgaaacgtctattggagcttttctccattgaaacttcctttatcctcttgttgcggttatgacaggagagctttatcgtctccaatggatgccgagccggcaaagcaagacaaagccgtcacaacattagcaagatgcatgaatgtcgccttgcgttccagccttttccacgcccggcacccatattccacgtcacatcgcgttcatcatcggcttacgctcgttacaaaaccggccgaccgaatttacctggtcacgctacactgctgtgagtaccgaaaccggctgggagccgagcgaaagcatgaacatataaacggaccgtatatataccgcatgatatacgtcccggcacgtcactggaagggagcggcaatgacgcacgaagacggaacgacaccgttgaatcatctggtaaaggtattgagactgggcgacccttccgaataccgcggacatacctacatcagcggggagagcctgtacttccccaccggacgcgtgtacggcgggcaggtgatcgcgcagtcgctgatcgccgcgtcgaagacggtctcgcccagccggctcccccattcggtgcacgggtatttcatcgcggcgggcgatatacgccaggatttgctgttcgacgtggagaccctgcgggacggccggtcgttctcggcgcgcagggtcaacgtgacgcagtccgaagggccgatcctgaccgccatcgcaagcttccaggaacaggggcagtccggagtggagttctccgatacgatgccgcaggacgtgccggcacccgaaacgctcaccagtgccaaggagctgatggaaccatatgccgacaaatcgccgttcgccaagttctatgcaaagaagtcgccgttcgacatccgccacgtcacgccgaccatcatgctcggcgccgacaaggacagcgcggcgcacgactcaggcaagcagctggtgtggatgaaggccgacggcgtggtggacgtgccgcaggtaatgcatcgggcgatgctggcgctcggctgcgatcaggtgatgatggaaccggtgctgcgcagggcggggctgagcatctcgacgcctggcatctcgtacgcgtcgatcgaccattcgatgtggtggtatcgcgacgtggacatcaaccagtggcacctgtacgtgcaagatacgccgaccgccgcgcacgggcgtggactgggcgtggccaaagtgtacacgcaggacggcgagctcgtcgccgcgatggcgcaggaggccatgatccgcgtgccacagcagtgaggccacggacgatgagtgcggcgggtattgaggctggggctgagactggttcggtgccgggaattgcggctgcggccggtatcccggttgcggctggtactgaggctggaccgtcgttggtgtgccattttgaactgccggaccggtctgggcagccgggccagacaccggtacggcattctcgaccttggttccacatttcgcgcagaatttagcgcctgcttcaagtgcactgcccacagtgcatgcagaacttcatgcttttccctctcggatacggcccatcacagaatgtgcgttccgatcagcggaaccgcggattccatgctctctccatggcgatcctattcctgcacctgcgaaacccccgtttatcgcggacgggggtgttcacctattgaaggggcacggagattgccggtgatcagagtgcgggatccgtggtcctgattggcaccggaccaccctcagccgctacgcggcacctcccgccagcgggaaggggcttagtggcgggttttggcggtggcggaggcgatgccgcggcggcgtttggcggccttcatcttggggttctccgggccctccatgggcggcagctggcacagccattcgccgacgataccgatcaccatgtccgccaggcatatcacagcggcgacggcgcattgcgtcacggccgtcgcatagtaatccgcctcgatatgatcgagtaccagcagaatctgcccggcgtaccagccggccagcgcagcgccggtcagccccagcgccttcgacagcataagcgtgtacacggccttggtcgggtcgagcggcttgagtcgggcccgcttctgcggatcggtggtggcgtactgatgcacctgcagcgccatcaccagcacgacaatgcccagcaacaggagcaccacggacacgaaccatggcgcccccaacaacgaaagccccgaggactcactgacctgcacaagcagacagcccgcgatcagaccgagcagcagcgcgacgacatactgccaccatggggtgcgacgtatcttcattccgtactccctacgatccaagtgtcggacagcagtcccacacggtcggcgtcgggtgccatggccagcagatacgacaccgggtcgccgccgagccgcgcctgcgggtccatgtccatccacggtgcgagcaccgaagcatgggtgcgggctgacggccacggcacccggcagtccggctcatcgcagaccgttcccggcatatccaccagatcgaggtcgacatccccgttcaacgactcctcgacggaaccgagcgtggcaatcagcgccttcgcgtccatccggcacgtcatttgcatgacagccgacatggcatccgacccatgcagatggctcacatgatacagcggtgagatgccctcgacctgatcaccgggaatgccctccaatgcgacaatcgccgtgcggaacagggtttcggcctcgttactgcggctgtccatcgagatgacggccgtatgtatggccggttgaacggtagcggtatcgccgtcgcccggtttccgcgccgaaccgtcgacggttccatcgaattgcggtatgtcggctgcgctgccggacggctgcaccggggcatcgtcggccatgccggtcatccaactgtcgtcgatgcgatgtacgtcctcgcggtcaccggtctcgtgcagcaaatcggcaatctctcccccgtgcgggcccgcgagccgggcggccggatcaagagccagccacggtgccaaaacgaacgcccgctgccacgcacgcggatgcggcaaagtcacattcgggtcctcgctgacgaggccatcgacatcgatgatgtcaagatccagtgtgcgcgacgcccaatgttgttcccgcgtgcgtccatgagcaacttcgatatgctgcaggcggccaagcagactcgccgcgtccagctcggtcgtgacctcgatgacagcgttgagaaaatccggggtaccatccggcatgccccatgcggcggtgcggtacaacggcgatatcccagtcacctgtgtgccttcaaggccgtcgatatccgcgatcgcggaccgcatcgacgccgcgacgtcgcccttgttgccgccgagtgcgatcacggcgtggtgcatgggcgtgacacggccttcatcagctcgaccagttttgccgtccgtattccgtccgctccgccatcgctcgatggtgacgctcacgtcggcgaacggcacggtgatcggagctttgggcttatgcacggtgacggttacgccttggactgcgggatggtcggctatcacggcgtcagcgatgagagccgccagccgctcaatcaagtcgacatgctcgccttcgatgacggatacgatccgtttggcgacgcgcccgtaatcaaccgtgtcatgcaggtcatcgctggaaccggcacgtgacaggtcgagatgcagcacggcatcgacgatgaagggctgcgcgcgctggtgctcgtagtccagcacgccgtgcgtgcccatgccttgaacgccggtgaggcgaatcgtgtccacggttgcgtcctttcgtttaggttggtggtgggtgaccaccccagtcagcttcgccgacggccctccggctgagggagaagggttagttttggtattgtcgccagagggagccgattgtcagggcggcgcggctgcggcgcacgtcatgcacgcggaccgcccaggcgccgtgttccgcgcacagggccgacaatgcggcggtggcattgtcacggtcgtccatcgtcggctcgccgatgccggcatcgttcaacgccgccgaaacgaaccgctttcgggaggctccgatcagcaccggatatcccgaccgcttgaacagatccagtccgacgagcagcggcagattatgctcgatgccgggcttggagaatcccagaccagggtcgatgatgacccgctccggggcgacaccggccttgagcaccgcatcaacctgagacatcagctcgtcatacacgtccttgagcacgtcgtgttcgtagtgcgaggtgtcggcgtccggcgcggcgccgcctttcgacccggccagccagccacgccaatgctgtacgatgtacaggcagtcatggtcggccaccacgtgcggcagatctcggtccagtcgtccgccggacacgtcgttgatgatctgcgcgccctcattcaacgcggcctgcgccacggcagagcgtgtggtgtcgatggagacgaccgctccgtgggcgatcagcgccttcgcggcaccggtcacacggtcgagctcgtccttctcgctgacgcgcttggcgccggggcgcgtcgattccgcgccgatgtcgatgatgtcggctcccgcatgcagcatgtcgtcgccgtggtcgcgggccttgcccggatccagccacaggccaccatccgaaaacgagtcctcggtgatgttgagcacacccatcagcagtgtgcagtcggtatcatgcaaccgctgcagttcagtcatgaattctcctatccgtcaatcgccgaaacggcggcgatgccgaccagtcatggcgatgagccggatcagtgcttggccatgatcagactcatcgcctcggcacgggtggccggggtgcgcatcacgccgcggaccgccgatgtgatggttcgcgacgcgggcttgttcacgccccgcatcgccatgcacatgtgctcgcattcggtcacgacgatgacgcccttggcgtccgcgtattccatcagcgcgtccgcgacctgctgggtgatgcgttcctgcacctgcgggcgacgcgcgtacagctccaccagtcgggcgagcttgctcaatccgacgacctgcccgttggacgggatgtagccgacatgcgcgacgccgtggaacggcagcagatgatgctcgcacaccgagaacagctcgatgtcgcgcaccagcaccatttcatcggtctcgaccgggaaacgcttagacagcacctcctgcgggctgcgtccgagccctgagaaaatctcctcgcaggcacgtgcgatacggtcaggcgtctccagcagaccctcgcgatcgggattctcgccgatcgaagtcaggaacagccgtacggccttgcgcacgccctcttcgtcaatcgccatatatcctccagcttccctcaccacttatatagtcgtcatgcccgccgaaccggggcaggcacaccgtttgccgtcaaacggcaaacgcccgtgcgcccggcgagcccctttgcgggaccgtcgggcgcacgggcacgaaatcaccgctcccccggcttcatgccgacggaacgtttgagcgactccggaatctccaccggaggcttgtcggaatcgggacggcgctggtcggacagccacaccggacgttccggagccttcctgatgttcgcgaagatcgcggccagttccttctcattcagcgtctccttgacgagcagctggcgaaccagctcatcgagcacatcgcggttgtcgttgatgatgttccatgcctcagtgtgcgcggtctcgacaaggccgagcacctcctcgtcgatgacctcggcggtgcgctcggagtacttgtgcggcgcaagaccatcgaaatcggcgctctggtcgtcggtgtcggcccacttgatggcgccgagcttcgaggagaagccgtattccacgaccatggtgcgggcgatcttcgtcgccttctcgatgtcgttcgacgcgcccgtggtcggatcgtggaacacgacctcctccgcggtgcgtccgcccatcgcgtacgccatctggtcgagcagctcgttgcgcgactgcgagtaacggtcggtggtcggcatgaccgcggtgtagccgagcgcacggccacgcggcagaatcgtcaccttggtcaccggatcggtgttgtgcagtgcggcggcgaccagtgcatggccgccctcgtggtatgcggtgttgcgcagctcattgagggccatgcccttcgactgacgcttcgggccggcctggacgcggtcgatggcctcgtcgatggcacggttgtcgatcagctgggcgccggcacgggcgcacagcagcgcggcctcgttgagcacgttggccagatcggcgccggtgaagcccggcgtgcgcacggcgaccatgtgcagatcgacgtccggcacgaacggcttgcctttggcatgcaccttgaggatggcctcacggccttcgaggtccggcgcctccaccgacacctgacggtcgaagcggccggggcgcagcaatgccgggtcgagcacgtcggggcgattggtcgcggcgatgatgatcaggttggtgtcgctgtcgaagccatccatctcgacgagcagctggttcagcgtctgctcgcgctcgtcgtgaccaccgctcatgccggaaccacgcttgcgtccgacggcgtcgatctcgtcgatgaagatgatggccggggcgtttttcttcgcctcatcgaacaggtcacggacgcgggaggcgccaaggccgacgaacatctcgacgaagtcggagcccgccatcgcatagaacggcacacccgcctcgcctgcgatcgcacgggcgagcagcgtcttaccggttccgggaggaccgtacagcagcacgccgcgcgggatgcgggcgcccagggccttgtacttcgacggatccttgaggaagtccttgatctcctcgacctcctgcacggcggagtcctcgccagccacgtcggagaacttggtggacggcgtctggccttcgagcagcttgccgttgttcttcttgccgcccatgccgaacatgccggacgcgccgcccatgcggctcatcaggaaccagaacacggcgatcatgatgatgaacggcaatatcgagctgatcaggtagctgaccatgctggtctgctgcatgttagaggtccaccccttggaggggtcggccttctcgaccgcctgcacgacctgcgcgccctgcgcgaacgtgtagtagaactgcaccttcttgccgtagttgtgcggcttgttcgtgtccggatcggtcttcgtgaagttgctcttcagctcaagctgcaccagctgcttgttgtcgatgatcttggcgtacgcgacgttctcggtcttgagcagggcgaagccgtccttggtgtcgatggtctgcgtgccggcgccggcgaacagctggaagccggcgaccgccatgaccaccagcagcacgccccacagccacggggacttccagaacggctgcgggccgcctgagttgtttcccttctggttgccgttggggtcgttggacgaattgcgtttgaacgggttgccgttgccgcggttgccattgccactcggcggcatctgctgagggccttgaggatagctcatacctgattattctccttgatacacttcgggcttcaacacggcgatggagtcaagattgcggaatcgctcgtcatagtccaggccgaacccgaccacgaactcatcgggaatctcatagccgcgataccgcacgtcgacgtccacttcgcggcgcgacggcttctccagcagcgcgaatatctccaccgacgccgcgccgcggcgcttgagttcctcgacgagccatgccaaggtacgccctgaatcaacgatatcctcgacgataagaatgtgccgaccgcggacatcgcaggacaggtcctgccgtatggcgatcgtcccgctcgattcagtgcccgacccgtagctcgaaagactcatgaaatccatctgcacgggaatgctcagcgcctgcgagaacgcggcgatggtgttcacggcacccttgagcaccgcgaccagcagcaggtcacgcccctgatagtccttgcttacctgcgccgccacctcgtgtatcttgcttgcgatctgagccttggtgatcagctcatggtcgatctcgtcttgaacatcagcgatttgcatggagaccatcttggcacacgcgaatgacgtgtttccgacgaaatgctgaatgaccgctgggaagtgccacggcaccctgaccgtgccactgcgagatcagccggtcgacggcgtcgacgtgacggaacccggcctcgatgccgaccgccgcgagcgcgtgcgcgatcacgcgcaatctgatcgcccgcggctcccgcgccaacgctttcgtgtcgatccgcaacagctcgcagtctccgtcgacgctcccgcacgaatccccggcgaacgtcaccgcgtgcgccgcaaccgattccgcgataccgtcgagatacgacttctcgatggatgcgagttcggcaccgtcacagaacctgctcacgatatcgccgccggcgaacgcgttcagatagggaatcagcgtgtggcggacgcgcgagcgcagcgggaaatcgtccggcaacggttcgtccgcagccatatggtcgccgttggtcgggtcatcccaccatgtgatcccgaggtcctcgcagatgccggtcgtgtccgcgcgggtcagacgcaggaacgggcgggcgaaccgcacgccgtcacgctcgacgatccgcggcatccccgcgagcgcatccagtccggaggaccgcagcacatccatcagcacggtttcggcctggtcgtcgccggtgtgggcgagcagcacgcattcggccgattcccgtcgggccgtatcggccagcgcacggtatcgcgcgtcgcgggccgcggcctcgacgccgtgaccgtcccccgacacttcgaccggcaccaccgcgaccgggtcgagccccagcccgcagcatcgccgtgccgccgactgagccacctcatccgaatgctcctgcagccgatgatcgaccacgacggccccgcatctgatgccccacgacgcacacacgatgccggccaccgccgccaacgccatcgaatcgcgaccgcccgagcaggccaccagcaccagcggggcatcgggcgcgggggtatggtcgccgtgctcggcgaagcgcggatcctgcctgggtagtcccagatcgaccagcatggatcgcatccggccgatcgcggcacgcatcacagcggtatatggcatgggtcgaaacctttacagcttggccagtttggcggccatcacgttgatcgccttgatggccgaccactggttctccgggtcgttgacgatcacggcgaacgacagcacgccgcccttgacgcgggacacgttgccggcgagcgaggtcacggcgtcgaggctgccggtcttcacgcggaacaggccgttgtccgggccggtgacgatacggttcctcgccgtgccgaccaggccggggatggacagtccctccgccgccgcggtggcgatgccggcggtgagattgcgctcctgtacctcgatcagcgtggtcacgctgaccttcgatcctggcgtcagaccggaacagtcggccatctgcaggccggacgtgtcgatgccctgctcggcgagcgtgtcggcgacggcctgcgtgtcggtcttgatgctgttgccggcctgacgcttgagcgccgtcagacggccgaatagctgggctagcgtattgtcggaatgcctcagcatgaacgccatgacctcgttaagcggcgccgagctgaccgaggccagcgctgaagtgccgcttggcgccgcgcccgcggtcggcccggacgtcacggtgatgccgttgtcggcgagccgcttcgcgaaggtcgtcgccgcgtccagcgcaggctgttgggacagcaccgggtattggctggaatcgtcgggattggccggcttgaccatatcggtccaggtgcgtccgccgtcgacggccatcgtggagatcgccgtatagtaccggtgctccgcgttgttttccgtgacgccagccggcgtacgatcctgcccgaacagcgaatcgtcgtacagcaggtcgacctgcgtgatgccgcgctgcttcaacgcctcggcggtgcgctgcgccagcgtgcccagcccggcatggccgttgatgtgcgagggatcgctctccccgtccgacagcagcatgtcgccctcaccctgcagcaccacggtcttgcggttgtcgtcgccctggatgagataggtcttggtgtcgagcgtggagcccatgtccagcgtggtcgccgccgcgaacgcggtcagtgtcttcagggtcgatgcgggctggcggggaatcatggcgtcatgctcggctacgatgttgcccttgccgtccgcgatggccagcgagaaggatttgcccacgccctcgctggcggagaactcgtcgaggatggtcttcgcggcctgggcgtcgacgggcatggacgcgtcgacgccggcggcgaccgtgccgcccgtgagcgcgtcctgcgggtcgggaatcgcgacgctgtccactccccgcaacgtcaggatgccgggtgccacgtcatagatgtcagccacgaaataccccgccatcaccgcaacggcgacgacggcggacaccgcgacggtgacggtacgccgcgtcatcggcagatgccgaatcatatgatgtcgggccgcagcctttgatgccacgagcgaactccttagacagacgttacatcatcgccgcaagggcgccgcccgaaccggctcagcgctgcagcgacgcgaacgaatccaacgtctggacgacacggatcgcgcgcgcatccaacagcttaccgccaagccatgaaccgatgaacatggccgccacgccattggcgagaccgatcggcgccatgacccatagccagccacccatatcggccacaacgagcacgatcgcgacgagaatcgtcggcagcatcggaatcagacagccgaaaagctgcacgaacgggaacaatccctgggcgacggcacggccctgcggcgtggagaacggcttgtccatcgacggcaccggatacatcagcgagcagttggtgatctccgcgacgccgatgctgctgaacgagacgcccaacgccagacagatgaacgtcacgcccaggagcaggccgtcagccgtgcgccaatcgccggtcaacacgaagcaggccagaccgagcaccaccatatatattacgttgacggacgcgaacacccgcatgcgggaccgacggtcgtcccagccgcgcacgccggccagcacctccatcgtgaaaccgcggccgtcgtatgccaggccgttgccctcggtcatctgcatcatccatccgccccagatcagaccctgccagatcacgatcgtgacgccacgcgactggagcgcgaacaacgccacgaacaggacgggcatcacgaacagcaggatctgacgcgggtcgcggcgcagatacgtcagcagacgggcggacatcgcgccggacgtgctgtccggcatccagccgaacgcgccgatgccgcggaccttcgcggcacgctcgggcgcacccgcggtcacgcggtcatgacgcaggcaccagacacagccgacgaagcacaccacccacgtgacggccaggatcgccagacgcgccacgaacaggagcgggttaccggtcaataggtcgtacggcaactggaacgcggctccgaacggggtccagctcagagcgtcggccacgctcagatccgtcaatgacggaaaatcatacagactgccggaatcggcggggttgtcgatgatgttcggcagctggcacagcacaatgaacacgatcatcgcgatgaggtagaacgcgttcttgccacgtttcgagcgcaccagcgtcgtcgatgccgaaatgaccagcttggccagcgacatcatcgtgatgatggccagcggggcggcgatgagctgcatgacgaccatgcccacactcatccaccggtatgcgagggaccacagcatcagcgccagcgtgccacagatcgcaggcagaccgctcaggccgccgagcagcatgccgagctgcagtttccggtcgggaatgccgtacagcgcgaaccggtgcggagccatggtcgagccgtcgccgacgagcatcaactgaatgaacaggatgatgaagccggcgaacgtcgacccgtacatcaccgcgacgtgcagcaccccgtacatccaccccgcagggatgtgatgacccgccatatcgaatacggggccgccgaggaaccacgcgagagcgccgactcccacaagggcgccgatgccgaatacgatgccgagcacatagccgatggtctgccacgtcgacttgcgcagggtggcaagggtgagcgcccagcgcagacgcaccatggtcaaagcgacttccatcatgactcctcgggcgatgggaacggggcggtgggcgcagacgagtcggcaggggcgacgccgttcgccgcgtatccgccgtcgagccacgacagcttggccgcggcatgccggccgccgaccagctgtaggaaccgctcctcaaggtcctcgccggccgacacctgctctatcgtgcccgccgcgcggacctgcccggcgttgatgacggcgacgtgcgtgcacatcttctccaccagcgacatcacgtgcgaggagatgatgaccgtgccgccggtggacgcgtactcggcgaggatgtccttgaggttcgcgctggacaccgggtcgaccgactcgaacggctcatcaagcaccaggatgcgcgggctgtgaatcatcgcggacgccaggcagatcttcttggtcatgcccgcggaataatcggacaccatcgtgtccgcggcggaaaccagatcgaaggcgttcagcaggtcgccggcgcgactgtgcgccacatcgcgcttcatgccgcgcagcatgcccgaatagatcagcagctgcattccggtgagccggtcgaatatctggtcgggctgcggcatgacgccgatctcacgtttggcggcgttgacgtcctgccacacgtcctgcccgaggatcatcgcggtaccggcgtcggggaccagcaggccggtcaccatgttgagcgtggtcgtcttgcccgcgccgttcgggccgacgaggccgaaaaacgagccgaccgggatgtcgagggacagtccgttgaccgcaatcttgcggtcgaagcgcttgtacaggccgcgaatggagaccgccgcgcgcgggtcgggcggcggcagtgtcgcaaccgcgggacgggaggggacggatgacgatgccgtacgcgcgggaaaaccgccaatctgcggctgattgtctatactcatgactcaagcatagaccatgcagcggtatagaccaatcatcccgcagatcgatgacgggccggcggcagccagcatcggcccggccggcggagtcagacatcgctgccgaacgccggtcgaagcacggcccaaacccgctcagcccttatgcacgattggcttccactgagccttggagaagatggcctggaacgaaatcggcatgtaactgagcatgtagatggggaaactcagcacataggcgaacagctccttgttggtggcgccgatgtggtcgcgttccgcgacgatcgtcaatgcggccagcgccatcatcgtcacgaccgccagcacgatgtcaaaggcccatcccgcaatcgcactgagctggctctgccacgtcacgaatccgaacgccacgaacagcagtcccagtacgatgcggatgacgcccagcaccgtgaacgggcatagcagcagggtgaaatcgacggatgagaaatcacgctcacgcacggcccgcttgatcagcgccatgccgtaataccggaacacctgcaggaatcccttgctccagcgcagtcgctgacgccagctctgctggaacgtgaccggctgctcgtcgtacagcatggcggtgccgcagtatccgatgcggtcgccgtgcaggatggagtccatcgtgaattccagatcctcggtcagcagatggaatttccatcccctgttgcgccgcatcacctcgcgagaaaacatgaatccggtgccgcccacatgacagctggagccgaggatcatgcgcgaattgttcaggaatcgcgactcgcggatgaaccacagggccgaaccggacgacacccagttgtcggccagattgaccgaattgcggtagctggtcaggatgcggaaaccggactggaaggccttgttcatctcctcgacgtaatgacggtcgagccggttgtcggcgtcgaacacgaaataggcatcgtagtcgtcggccacacccgagtcaatcatggtgctcaacaggtacgacagcgcgtatcccttgccgatcagctccgtgtcgtggcgttcgacgacatggcatcccatctcgcggacgacttcggcggtgcgatcggtacagttgtcggccaccagccagatatcgatcagcttgctcggataggtctggttgtgcagcgagtcgatgaggttgccgatgacgttctcctcgttgcgcgcggagatcaacacggcgtagcgcttgtccatcggcgcgtccgggaagtgcaccggcttggagaacagagacatgatgacgcagatggcctggtagatgatgccgacgccgcccaccaccatcataagcacgtcgattacggtcagcaatgccattagcgccacctgcttcgcggattgtcggtagacccgtcaccacggcgtgggcgggcggtctttgcgggacggtcggctgccggcttcgcggcggtgccggatgattcgctgtcggacggtctatcggaggaggtcttcgcggcgccgggctctgcagagccgtcgctgctaccatcatcgccatgcgcctgtgcggtaccgtcaccgactccgcgcaatttcacggcgttgcccgacttcgccccctcgcgcacgctgcgcgacagcacgtccttcggtatggcaatcgtttcggaatcctcggtctcgttggcctcgtcaaggtcatatatctggtcgcgcagcgcacgtagctcgtcgctgatcggcacatgggcgctcgatcctttggcggcgcgcggcatatggtcgctcatcggcttgatcacgcgctcactgaacgcctcggcgccctccacgaccttggacttcttccccggcaccggatcgctcatcagcggcgactccaccagcgcatagcgcttcgtgtacaccttgaagatggcctgcatgctcgccgtgaccggcagtgcgaggaacgcgcccagagcgccgaacaacgcgcccatcaccagtacggcgaggaacgcgacgcatgggttgaggtccatcgtgcgctgcgagaccttcggcgagagaatcaggttctcgatctgctggtacacgatgatgaacaccagcacaccgaccccgtaccacaggccattcgacccccaggcgaacagcaccggcagcgcgccgccgatatacgtgccgaccgtcggcacgaactgcgacacgatgccgcagaacaacgccagcggcagccaatatggcacgtggataatctccaggaaaacggcggtgcaggtggcgttgatggcggccaggatggagcgggagaacaggaagccggaaatctgctcctgcaccaccgtccagccgagcaggaaacggcgctgcgtgttcggtccgagccactggcacaggctgcggcgcatcttcgggcccgcggtcgaaatatagtacgtcaccatcaacacggtcagcagattcaacaggaagctgaacacgcccatcgtggtggtcaacgcctgaccggcgaaatcggtgatccacgacgtctgcacgttcttgaatatctccatgccgaggttctctatcttcggcatgtcgaacgacgtgtactgcttcaccgcgtccacgatctccgtgtatatcgacggaagccccttcaccatggagatcagctgctgcacgaacatgttgccgaacagcgtgagcaaagccatgacgatcacggcgaggccgatcaggctcaccgccgacgcgaggccacgcttccagccgtgtcgcaccatcgagaccaccagcggctcgaccgccagcgcgatgaatatcgagatgacgacatccagcacgatggtcgatatcttgccccacgatgtccacacgaaaatcgcggcgaacaccgcgatgaccgtgtacaacagcgcgcgcccccaccaatccggcggtcgacgcgaatcccctttggcggggaacaccgacgccaaatccagtttctgatcatccgtttcactcatgagaccctattgtagccagcgggagtgtacgcacaggtgcttatcctataagtatgctcaacgtttcgattatcatccccgcgtggaatgaggaggagcgcatcgccgactgcctgatgaacgccacgcgccagaccgtcgcaccacatgaagtgatcgtcgtcaacaaccgttccacggaccgcacctgcgacatcgtcgaacagttccagcgcgaccatcccgaagctccggtcatcctgctgcagcagaacgaggatcaaggactgatcccgacccgcaacttcggtctgaacgccgcaaccggcgacgtgttgggacgcatcgacgccgactgcatgctcaaacccgactgggtggaggtcgtgtccggcatcttcaccgaggatccggacgccatgggcgcgaccggaccggtggtgtattacgacatgcccgcgaagggtgccgggctcgccggcgacgaccacatccgccggcacacgtaccgggcggacaacgatcaggtgctgctgttcggttcgaacatggcgattcgcgcctcagcatggcacgccatctcgggcgaggtctgccgcgacccggaggacgtgatgcacgaggacatcgacgtgtcgctgcatctgctcaaccatggtttcaagacggtgtactcacagtgcatgatctgcggcatctccgcacggcgcatggacacgtccttcgcgtcgttccaccggtacatgcaacggttcaagaacacattcgccgcacatcccgaccattggcgcgagcaccacaccgagcggcgcctgtatgcgctctacccgtggctgcacatgctgtacccgatttatcagcagcatctggccgcgaaggacatcaacccggccgagaagatctggttcgacgagcagatcaagctcgtcaagagccatttcgacaatcccgagcaggtggacgccgtcgaatgacgtcggctgacgccagccgacagatgatggtggggttccggcacggtatgtgccggaaccccaccatcatctgttagccgcatccgttgcggattatcgcggctttctcccgctcacggggccggccggcggatggacgcgccgccgcggaccggtcccgtgtcgctctatcacatcagcgaggtgtagatcttcaggatgtcctcttcggtggccttgcgcgggttgcccggcgtgcacacgtcgttgaaggcgtcgtgggcgagcggtgccaagtcggcctcggtggcacccacctcggaaatcgtggtcgggttcttgagatccacggtcagctggtggacggcctgcacggcctcctcgcgcaccttctcaaggtcgccggtgtaggcgtcctcgataccgaacgcgtcggcgatgtcacggtacttttcgccggtgaagtccttgttgtattccatgaccggggccagcaggatgccgttggccacgccgtgggccacgccgagacggccgcccagcgggtgggccatgccgtgcacgagacccaggccgacgttggagtaggccatgccggtgatgtaggaggcgtaggccatctgctcgccggccggcacgtcgccgtcggcggacttggccaagttcttggcaatcatgcggatggtctgcatgctcaggcagtcagacaggctccatgcgcccggggtgatgtagccctcgatggcgtgggtcagggcgtccaggccggtggcgaccttcaggccgcgcggcatcgtgtcggtcaggtcggggtcgacgaatgcgacgatcgggatgtcgtgggggtcgacagccacgaacttgcgcttgttggcggtatcggtgaccacgtagttgatggtggtctcagaggcggtgccggcggtggtgggcacgccgaagatcgggacggacgggttcttggtgtcggccacgccctcaagggacagtacgtcggcgaactccgggttggcggtgatgatgccgatgcccttgcaggtatcctgcggggagccgccgcccaggccgatcaggaagtcggcgccggattcggcgaacttcttgacgccgtcctggatgcattcgaccggcgggttcggcttgacgttgtcgaacacctcatacggcaggccggcctcgtccagcacatcggtgaccttcttgacagttccggtcttcagcaggatcggatcggttacgatgaacgccttggtgaagccatgggacttcgcgaccgccggaatctccttgatggctccacggccaaaatacgcggtctgattgaagatcatgcgatataccatgctggctctcctttgaatgacgcgcgggcgttgcgctcggcgtatctgctatgacgattcctatcgtacctcgaaaactggaaacatgctgggaaggtaacgcaaacacagcagagaacagttgcggtatagcgctgtagcatacaatcgcccccgcggccttacccctacgaaaaatcccatttgtcaccgcgtaagtttcttcatcgcaagtcccacaaagcagtacatgccgtaccacattatgagctgccccgcatcccgccgccctcattcatcccgccaaagtcccatccgcacgggctgaaacgggacttcgctcggactagacactcggacgacacccccatccggccaaaatccgtttggcgcggcgcggatgcgaccatacacggatgacgtggccagaatgctcatgctggggacgatgcaaagaggcgatttcatgcctgcgcatcaatcagacgcccggctgcgctccgctcaggaatgatgcacggcactcgtcaccttgatggcggtccatgcgccgcgtacggccagcaatgcaagccatgcggcgaacagcagcgagccgacacgcggcgaaatcagcccggcgatcaacgtgcccaacggcgccgtctgacatttccgcccgcgccacgcttgctcttgccttcttcaatcatgctcacgggtttactctagcgcgggtaacgcctccaaccagcaccgggtgcaaattacgggttgaaatcgccgttctgggcaattccccgtgccaaatcgccgttttaaggtccaaaaacggcgatttggcacggggaatcacggattgcggcgatttcaacccgtaatttcgggaagagtggggaaaaaagagaccgggaggagggagggtgctgggggcatgcaggaccgagacgcatgctgaccctagcccacgcaatcgggtaagacccatgacccgcccgacttctcgaccagatgcaagaaacccgccatcccaatgtttccaaagggtgacgggttttccgtggtggctccgagcggcatcgatccgctgacctagcgattttcagtcgctcgctctaccaactgagctacagagccagtgaacataaaaacccggcgaaaaccgggtcttcacattccagcgaccccggccggacttgaaccggtgacctccgccgtgacagggcggcgctctaaccaactgagctacggggccatatgcttgtttgtaagcaacgagtagatatattacagagttctgggcgatatgcaacttcggcgtgtcgcagcgcccgcagagcctcccagacaggcccgaacaccaccgaggatgaacgcgattcccagtatttccagcacttcccgcacctaccctatcagcgctgccaacggcatgatcgcgagactggtgaaggcggagtcgccgtaatccttgtagacacaatcgccgttgatgcagtacgacccgttccagatttccggatgattcaccatgtatacccccaccgcgatcgcaagaatgatggtgatgataacgatcacgatggcaatcgcgctgatgacgatgcccgctatggcgaacgccttgccgcgctcctacgtgcggttgatctgccgcagggcgatgatcgagagaatcagtccggccgggcagaacacgaacgacaggacgaacccgacaatcgacatcgtgttccatcgatcgttcggcgcatagtatgccggcacgccataggggttcgcgccatacagaggatacggaggatattgcgcagcgccatagggagccccgtactgtggctgctgggcgccataccccggtgctccatagctgccggtctggctgtgctgaggctggccataccctggctggcccgagtacccggtctgaccataatccggccggccatatccggtctgaccatactcaccctgaccatacggcggcacctgaccatccgcggcaccggcacccggagcccacgaaccatcgcccgcctgctcatacccggcctgcgtcggcacctgcccgtcattaccgtcagtcggcatggcacttggcgtattcgatgacatctcaggactccttcggtcgctatcgttcccgccgccgatcatcgcccggcgctacgcccagtatatcctgtcaacgctttcatctcaacgccaaggcatcacagcgccatccccgaaccggcgcaatacgatcggacagaccagggccgaccgcaccgccccatccgcagacgaagcgacgcgaaccggccccgtattcggtcgagtcaccattcagacggcggtacgtccggccataagccgaccgtcaacgcccagcagcccgaccggccacccagtcacccggccacccgttcagccgacctgcttccaggtggcgacgtcgatgtggtgctcggggttggcctgccacgcatcccacgcggacttgacgatgtcctccacgtcgtacttggcgtgccagcccagctcctcgttgatgcgcttcggagagccgatcaggtgtggcgggtcgcctgcgcgacgggccatcacggcctcggtgaacggcaggcccgtgaccttcttgacctcgtcgacgatctggcgcacggaggtgccctcgccggtacccacattgaaggcgtcgtacttgcgctcgtcgcggtcaaggtacttcagcgcggcgatgtgagcgtcggccaggtcggagacgtgaatgtagtcgcgcacgcaggtgccgtccggggtcgggtagtcgtcgccgaagatggccggcgccttgcccttcttcaggcggtcgaacagcatcgggatgaggttgaggatcgcggggtcctccagctccaccggaccacatccggccacgttgaagtagcgcagcgcgcagaagcggatgccgaacggctgctcgcaggcgcgggccatccactcgccgaacagcttggtctggccgtaggggttgatcggcagcatagggacgacgtcctcgggcaccacgtcgaccagcggcacgccgtaggtggcggcggaggacgagaagacgagcttcttggcgttcttggactgggtcatgccggtgagcacgttgagcatgccgttgatgttctgctggtagtaccacagcggcttctcgacggattcgccgacctgcttgcgcgcggcgaagtggatgacggaatcgacgtcttcggcgtcgaggatctcggcgaggcggtcgccggcgcccggcgcggcgatatccatgccatacaaccgcgcgccttcgatgcgggcgggctttccgtagctcagatcgtcgacgacgacaacgcgttcgccggcttgatggagcgcatggacgacgtgggcaccgatgtatccgcacccaccggtaacgagaactgtcatgtctgtcctttcgtgaccgtgagcataaccatcggcatccgcgacgactgaccataaccaatggttaacgatagttgaatgtttgattatgctcgcttttgttattttttcgaacagttttatcgtagcacatgaacataagagaacaaaatatgttcattgaaacattaccgacattccagaccatgcacagatgacaggcgagacggcccatcgaagcacggcggccacgaaggaggtcaacggccccgggataatatggcacataccacgaccgaccagaaacgaggaaaccgtgccagagcagatcgaacagccgactttcaccccgcgtccggtactgtcgttcgtgcggcgatccggccgtctggacgcgcggctgcaacgcgcgtgggacaactacgccgacacgtatctgctggacatcaacgacggcgaggggtcgctggacgtgcgcgacgacttcacgctcgaccgcgacaccatcgccgtgacctggggcaacgccaatccgctgatcgtcgaaatcggcaccggacaaggcgagaacatcgtcgccgccgcggccgcgcatcccgacgtcaacttcctcgcgctggaggtgtacgaccccggcatcgcgcacacgctgctgctcgccggcaagcagcggctcggcaaccttcgcatcgcgcaggtgaacgcgcccgaactactcgccgcgaccgcccccggctccatcgccgaggtctggacgttcttccccgacccttggccgaagatgaagcaccacaagcgccgcatcgtgcagccgcagctcgcgcagtccatccacggcgcgctagccgacggcggggcgtggcgcatcgcgaccgacatcgaagactacgccctgcacgtgcacgaggtgatggacgggcgcacggacttccgcaacgccggcacaatcgccgtcagcctgcccaccgggcacgtcggcaagggcaacgctgagctcgccgacgacatgccgcacgccgatttcaccgaatcggagcgattcgacgaccgggtgctcaccaatttcgaaaagaagggactcgccgcgggtcgggtcatccacgacctcacctatatcgcggtgtgacgccgattacggcgtgtcgcggatttgcattatcgtcgcagctcacgtaatgtatatcgagttgtcagcccccatcgtctaacggttaggacaccagactttcaatctgacaacgagagttcgactctctctgggggtactcaccagctccgggttccacgaggtatcgtggctcggagccttttgtttccaacggtttcaggccatcagcttggccttcagttgctcgaacaggaaatcgcgcggtggtcgctgccaccagagatgcacctaagttcctctctcccagcatctgacgcatgagcgtgtcgtccagcagggacatcacgggcacgccgaagtagtcggccagcgccgcgatgtcggggatactccacgtgttcttgttcttcatcttcgcggcgcagcagagtctgtcctgccgcggagatggggtaatcgaagtcatcggctgcgggaaaggcgaacggctccctccattggcagcaggccgatctcgtctggctgtatcggatgaaggggctgccgtcggatttcgtgctgggcaacgatgccgccctcatgaacaggctgctgtctcctccggcaaaagaaggttccgcgcactaggcgcgcaacccgcgcacccgcaagccgatcgccaagggacaccgctcgcgcatgtgggacgtcgtcatggacggcggccattccgccgagaacatcgaggagaagccccggaacctggacacgctggcggaaggcgacagcaagacggatccgatgaaggacaatttgtcacccgacggattgtcacccgagccgaaggacgtggagccgaggacaaattgtcccggaatcttggacagaaagtcgcccaatagacaagtgataaacaattctcccctcatccccttcggggatgctcccctcaacgccgaatcagcctccacgaagccggtcgctgatccgaagcccgaacccgttccggcgaccatggccgatcgcaagaccgtccactcgctgctgatcgacaggccgtacggtgagatcatcgcgacgatggactgggcgtaccgatctacggggcggcgctgctgcgcacctcgctgtgtcaggaacacatcgaaggcgtcatctcgcaggaggcatgcccggtatgcgcatacgacaaacgcaaccacgccacccacggcatcgccggacggcgcaaggcgaaagccggcgcacaggcagaggcggtgcggccatgagcggggacgggcagcatcttgaggcgcggaagaaggccagcgaatgccgcgacttcccgcaaccatggtccgactacctgtggtcgctggagttcgagcaccgtcccggcgacgcgaaggcgttcatcaggcgctttgcggctgtttgcttatcttggtcgaaaacatcctacccaaaaagcgctcttctcttactcccccaacaaccaacggagaaaccccacccacgagaacagcaatagcgcccaattatctcaccttctatttccttcaaataagaacggcgggctcctttgacaaggagcccgccataatccttttatcagccgccaccaacgcggtatgcggtgcagatatcgggatcattgacttcggaaatcatgaacgcttcatcctgcatgattcacctcagctcgaccctactgcttgtcggcttcctcggaggcgagtcgtccttcgagctgttcgacgatgtgggcgtgcatgttctcgtcgatcttgacggtcaggaggaagacgacgaggctggcgacgatgccggcgagcggcaggtagtaggcgcaggtcttgaacgtgcggatgttcgcggcggtcatgtcggcggcggtggcgttgccgaccattccggcggcgacgaccacgaagcccacgatgccgttggacagggcgccagcgatcttgtcgagcatcgggcgcacggagagggtgacggcctcgttgcgcttgccggtcttgagctggccgtattcgatggagtcggtcatgctcaggatggcggtcatctggatggtctgcgcaggcaggtagaagaggacgagcgcgacgatgacgacgggcaagttcatgggcgcgatgatgaacagcgtgtagccggcgatcatgagcgccatgccggcggtgtacagccagcggcgcgggatgcgacggttgagcaccgggtagaggggcgtggtgcccagtccggtgatgaccgggatgatgccggcgatggagaagctgtccggagctccgagcacgtacttgaaccgataaaaaagcacgccggtggtggcgacgttggccacggagtacagcaggtagctgagggccacccacaggagctggtcgttctgggcgatggccttgaacgcctcgatggggttgccgttggcctcggccttggcgcgcagcccgccttggttctctcgggtgccgaacgcgacgctccacgcggtgagcaagccgagcacggcgatgatgatggcgaacgccgcccagccggtgcggccctgctcccactggccggtgaacttccaggtgaaccagctgacgacgggcacgacgatgacggtgacgccgttgtagccgatggatccggtgaacgcgccgagcgcggtgtacgtgctgcgctcgtgcgagtcggaggagatcgcggggatcatgccccagtaggagatgtcgcgcagcgagtagatcacgtcgagcaggatgaacacgatgacgaacaggaccatgaacacgccggtgttcacgtccacgaggccgaacaggccggtgaacaccatgatcagcaggatgccgggcacgatgccgccgatgaactgccacgggcggaaccggccccagcgggtgttcgtgttgtccacgaggttgccgagcagcgggtcgaggaagatctccgcgatgcggatgaccaccacgagtccggtgatcaccgcgatgaggcgtttggcaagcgtcttgtccacgtcgatgaacagcgcggtggtcacgaacgtgatgaagaacgtgctcatcgtgttgtagaacgcggcctggcccaggttaccgaatgcgtatgcgatcttctgacccgtgttccgcgtgggctgcggccttccggtcgtttccgtgtgttgtgtggtggatccgctcatggtgtggtggcctccttgcgacctgtaaagaatccgtgcgcgtgaaccgctccgatcccgcaaagcgtgagtatagaactttcttgaaaaagtagaaaactataccgcgtgtcgcaaatcatgccaacgttctgcaaccggcactccgtgtggatgagtaaggtttgaagcctgcttgatgtgcttgaatcttaagaaatccacgtattttgcatgttgcaggccttgtgccgcgaaatgctggaaagaatttgcgcaatcaagtaacagtatttatccttgttgtacaaggaacccgattcaacgaggttccctcactgcggcggcaacgacgcgacgcaatccgatgcgaaagcgaggacatcatgaacacaaccgacgatcagcggaagaacggcgatccgatcgtctccccgtccataccgacgacggcatggctcgccgacccgcgcgtgtacgcggttcaccggctcgacgcccattccgatcatgcgtgctggtctcgctccccagtcgacggcgagggcacggatctcaggcagagccttgacggcgaatggcgggtccgcgtcgagacggcgccgacgggtcgtttccccgatgggacgagcgacgggccggactggagcagcgacatgtcgcctctgttcgccgcgcccggattcgacgattcgtcgttctcacgcgtgcaggtgccctcgcatctggagactgcggggctgcttgccccgcagtacgtgaacgtgcagtacccatgggacggacatgaggacccgaaggccccggccatccccgagcacggccatgtggcggtctaccggcgcgagttcgacgcggatggcgaagtcgcccaggccgtgcgcgaagggcgcccggtgacgcttaccttccagggcgcggccacagccatctacgtgtggctcaacggctcgttcgttggctacgccgaggactccttcacgcccagcgagttcgacgtgacggacgcgatcaaggtggacggcaacgtgctggcggtcgcctgctacgagtattcgagcgcgagctggttggaggatcaggacttctggcgtctgcacggcctgttccgctccgtcgaactcaacgcgaggcccgccgcccacgtcgccgacctccatgccgacgccgactgggatctcgccacatcaaggggttcgctctcgctggatgtgctgatcgacggtgccgcgaacgccgcgacggccgacttcgcactgcgggacaagaacggcaccatcgtctggcgcaccgccacgaaagcggacggaacgctgcacgccgaggccgagatcgatgacgcggcgccatggagcgccgaacgtcccgacctgtacgagctatccgtcactctgctcgacgcggacggcaaggtcctggagaccgctcgcactcgcatcggcttccggcatgtggccatcgaggacggcatcctcaagctcaacggcaagcgcctcgtgttccgcggcgtcaaccgccacgagttcgactgccggcgcggccgggccatcaccgaagaggacatgctgtgggacatccgcttcatgaagcgccacaacatcaacgcggtgcgcacctcgcactatccgaaccagtcacgctggtacgagctgtgcgacgaatacggcatctacctgatcgacgagaccaatctggagacccatggcagctggaacagccccggcgacatccccgtgggaacctccgtccccggtgacgacgaggcctggctgggcgcgtgcatcgaccggctggacagcatgatcctgcgcgaccgcaaccatcccagcgtgctcgtctggtcgctgggcaacgaatcctacgcgggcgaagtcctcaaggccatgagcgcacacgcgcaccaacttgatccgggtcgtcccgtccactacgaaggtgtcaactggaaccatgcctacgacgggatcagcgacttcgaaagccgtatgtacgccaagccggccgagatccaagactggctcgaacacggcgacgaacggggcggggcgagcaagccgttcgtcagctgtgagtacatgcatgccatgggcaactcgtgcggcggtctgagcgagttcatcgacctcgaacggtacgagcgctactccggcgggttcatctgggattacatcgaccaggggctcgtccagcgtctgcccgacgggagcgaacgcctcagcgtcggcggagaatggggcgaccgtccaaccgactacgaattcgtgggcaacggcatcgtgttcgccgaccgcacgcccagccccaaggcgcaggaggtcaagcagctgtattcgccggtcaagctcgcccccgacgggcacggcgtgaccatcgagaaccgcaacctgttcgccggcaccgacggctacgtgttcgccgcacggctcctcgaagacgggcatgagatctggcatgccgactaccgtttcgacgtggccgcaggagatacccaacaccatgacatcgccttcccggacatcgacgcggacggggatacgcgcgaagtcacctacgaggtcgatctcttgctcgccgaagccaccgcatgggcgccggccggctacgagctcgcgttcggccaactcaccggcacgctcaaccccgaacaggacatcaccgagaccagccatgacgacgacggccgcgcaactcgcacgctcagccgatggaacgccggcatccgccgcgacgacgaggaaattctcctgtcacgcactcagggaggcatcgtctcctggaagcgcgacgaccgggaaatggtcatccgtcgccccgaactcgtcacgttccgcccattgaccgacaacgatcgcggtaaccattccggtttcgaccgtgccgcatggttcgcggccggccgatacgccatcgtaaccgaaacgaaaatccatgaaagcgatgacggtctcgtagcggaataccagtacgaacttgccgatccgaaccacacgcccgtgtccgtcacttaccatgtcaactccgatatgcgtatgcaactgaccgtcgaataccccgggaacgccactgacatggccagtctgcccgcgttcggtatcgaatgggagctgcccggcgaatacgatcgtctgcgctactacggccccggccccgaggagacctaccgcgaccgtaagcagggcggcaagctcggcatctgggacgccaccgcgaaggcgagcatggcgccgtatctcatggtgcaggaaaccggcagccacgaggacgtccgctggctcgaagccaccgacatccaaggccacggattgcgcgtcacccaacgcggcgaccgtcacttcacggccagcctgctgccctggaacacctacacgatcgaggccgcgcgccgccacgaggacctgcccaaaccgcgccacaactacctgcgcctgctcgcggcccagatgggcgtcggtggagacgactcctggggagcccccgtccacacggcctaccagctgcccgccggcaggccgctcaccctcgacgtgaacctcgaactcatctgaccggcaacgggcggcggcatgcaccaccatgccgccgccggccccgcctacgacgcggcgatcgaggccacgggcgctgcggccgcggacggcaccggcgaggaggcgttcgagcgcgccggccacgcggtccacggcaccacccgccaggtcctctcgctcatcaccaacccgatggacgtgatctgccgcaacatccgcaccgtgcgcgagaagatggcaacccgccccgacatcctcggctgccacctcgaaggcccgttcctcgccctcaagtgcaagggcgcgcacgattcgaactgcctcaaagacccgatgcccgaactcatggaccgcatgctcgacgcctcgggcgccgacctcgccgccggcaagctcggttgcatccgccagatcaccatctcgaccccaccgactggaccgcccaacacgtctggtgcgccggccgccaggtggagtaaactccttccagcaaaatcgacgccggtgccgcccgtcttcgagacgacgtcttacgcctgaggaacgaagcttgcgcgcggcaccagttcggtcgtcagcaggatgtgacgacgcacccgccgctcatgcttcaacccatcgatcagggtggagaacgccatgcgggccaactccctttgatcgatcgcatacgaactcagcggcggcgacgtgtaccgggcgatcgactggttgttcacactcaccacggccaactcgtcgggaacctccacgcgcagtgcgttcaacgcctgcaacgcccccaccgcaagcacgtcggcggccacgatcaaaccatcgggcatgctgccggcctcacgatggtcagccaccaactgctccgcgagacgatagccgttctccacggtgaacgtgccggacgaatacaccaatccgtccgtttccaatcccagatgcgcggcccactgacggaacgacagctcgcgaatgtcctcgggatagtcatgcatgcccatgatgctgcccacgccgccgagaaacgcgatatgactgcggcccgccgcgatcatcgcgtccaaggcgtccagcatcgtctgcgacagatcgggacacacggagtcgaacaggcgcggcgccggattcgtgtcgatgcacacgccatgcgggagcaccatatgcagggctcgcaggtccgcttcgggaaacaccgtggctcccacggtgatgaacccatcaaactccgttgcgcgttccgtcaactcgtgtatggaccggatgaacgtgagctggtccaattccaacgactccgcacgctccgcaagaaccttccgcagatcggcgaagtacgcgtcctgcaattcctccccggacggaggcgcatccaacaccgcgatcgcgggacggaacacgttgcgataccccatctcctcgcacacgcgcaacacacgccgacgcgtctcctccttgatggagaacgacgggtcgttcaacaagcgtgacaccgtgctctgcgacaccccggcccgtcccgcgacttccttgagcgtggccatgacatcctccccgcaaactttagtaaagggttttactacagcataacccgggaaggcggggttagcggcattggcggcgtggaagtttacccatgactggtagactgcacatgtcccggcaataggggcaatgcataggggggtggcgggcatgtgcagcaacattcccgtcaccttacgattcttatagcgtgtcaggtaaaagaattatgattctcaatccaccttccggccgcgcctgcagactcaaatggccatgatgcatagcgacaatctctcgcactatggataaacccaatccgtgatgaggtgatgcagatcccacatgcgtatttatcctattatcctcccctctgttaaaaggtgacaggaaatcatctatcctcgtatcggaaagatccatgccggtattggatatgtctatcgcaatgcaggactcgccttcgtattgcctgtcgttggctaagtttatccatacatgtggttgagccgcacgattatgctgaatggcattcgtaataaggtttgcaatcatctgtctaattagcagaccatcggctaggatatatgcattctccagattggtatgtacttgaactctatctccgataagttccatattttcctgaagaacattgcgaatgatctcagctacattaactcggctaagatcagctcggtttaattgctgaactttcgacaattcgagcagatgattgacgatttcaaccccagcatgatttgaagccaaagccttttcgacgaaaggtctgcaacgctcatcgaaaagctggttgtgcagcggaatctccaatgcggccgaagtggccgcaagtggattttttaactcatgtgacgcatcggcgataaattccttttcccgactgattgcgctgttgagatcctttaacatgaggttgtatgcggatgcaatagtgtacgcctcgtcgttttcatatggaataacgataggttgcctttccaatccagcgtcggacgcgataatctgagaggccacactattgattcttcgttgtgtcctagtggcgataatccaagttattcctccagataatatgccgaaaacaatgatgggggctatgcttaccgccaatatcagatcccgggattttatgtctccttgttccatagttagcgttaaagcatccttaccggagtcatacccggcagaaacgtaatccttaccggagtcaggaggaatggcttgcgaattcaaactatgttgttcatcggcatcttctgcctgagtaaaagatttatttacggtcactgtttccagttgccggttcacgacataatatgtcatggcggtcaccactccggtaagcatgaagaacacgatgacgatcgtggtgaccaatcttcttcttgtagaccactgaaacggtaaacgcagtttcggatggctggaatggctcccattcgacgaaggatattcaggctttttcatgatatgcgatatccttgtccgggaacggtttcaatgaaatcagtgattccgattttcgtgcgaatcgcatagattgtggtcttgacgattcctctcgtatgagcgtgatcatcctgccaaatctcacgatatagacattccgcactaatcaccgcacctcgcgcctcaatcagcgtcctcaatacggcaagttctcgtttcccaaactttagttctgcaccgcgaaccgtgatggatcccgttctgaagtccgcagaaaagtcatcccggttgtagaccatgtcattcaccatgctcaaacgccgacgcaccgcattaactctggccagcagttcggcgtattcaaatggtttcgttaaatagtcatctgccccaagatcaagcccgcggactatgtcctcggtctgagatgccgcggtcaacatgagaatgtgtatgggatcacgccgttcgcttaacctcttagcgatttcgtcaccatgcagtccgggaagatcgcgatcaagtatcagcatgttccactccccggaattcagttcctccagggcatcccggccatcgtaaacagcttttgcctccatgccttccatggagagtcccatccgtaccacatcagcgagattggcgttgtcttcgacaatcagaaccttcatccgtccagctcccttcgcgaaacaatgcgcacaccatagcattcgcgtccaacctggtcaggaatcggtcaggttcagtcagcggcaggtcaaaacccgccttgccagccgtgcacgtcgtagctttgactccggctggacggacttccccgtcgcggcctctttcacagaagaaaggaaacaacatgatgaacatgaagaaaggaatacatatgtcaaaagatgcgttgcgcgtggttgcggctgccggtgtgttgtcagtggtgttgggtttgggggcgtgttcgatgccgggttccgggaatgccggtgcatcagatgggggctcctcctcgtcttcgtcgtcttccggatcgtcgtcgtatgaggcggagttgaagcaggcattgcagtcggcgtcgagtgatttcgagcgcggggtgttggagcgcgcggtcaaggccggcaggatcagcgagtcggattaccgcgaggcgaacgagaagtaccaggagtgcatggccgccaagggcgacgacgtggagttcgacacggaccagtccaccgggttgatgcaggaacacatgaacacggacgataattacgattcggccaaggcgaacgaggacagcatggcgtgcgcgaagggcacgaacctgcagatccgcgacctgtacgagcgaatggtgcagaacccgtcgaacgcggacgagatcgaactggtcgtgggttgcctgaaacgacgcaagctggtgcctgattcgttcacgaagcaggattacctgaccgagatgggcaagcccgaggggtcgtcgaagctggacacgtcgtcggacgcgttctcccagtgcctggcgaacccgagcaagtagaggaagtgttgctcgtgtttcgacagggaagaatagtgcccgcacgcgtcggcgggtgaacggcgtggggttcgtggcggcgtgcatggccgcgtgtctggcggcgggcatgggcctggccgtggggctggagcggacgatgacgccgccgtccctgtcggattcctcggatgcgggaaatctcgcgttggggtcggaggagttcgacgacgtgcgttccctaaacgtggacgtgacggcgtcgccggccggtggggtcgcgttcccggtgtcgggccgggccacgttcgcgtcgtgccccgcggacggcgtggtgcgttcgggctcacgcgagtacggcgtggatggcacgcctctggtgagcctgcacacggacactcccctgtaccgcgatctggcgtacggggacaagggcgacgacgtgacagcgttgcagaacgagctggccgcgctcggctacggcggctcccggtcgggcgtgttcgactgggccacgtgggacgcgtggcggcgcctgtacgcggcgaacgccggcacggccacggcggcggcccgagtccagcagggcgcgttctcccgcgcgttggcggtgtggctgcccgcgcagacgatgagcgtgtcatgcgcggcgtcgctgggttcgaccgtgaccggcgattcgacggattcgctcgcgttccgcagtctggccggggtcgcgtcggtcaaggccgcgtccctgccggacggccgcatccaaggcgatcgcgtggtcgaaatcaacggcagggactatcccatcggcgacgacggcatcgtatcggacacggccgcgttgcaggcgatggcgggatggtccacgtacacgggcgcgcacaaggacggcgaggacgtcacgagcgtgaccgtgacctacaagctcaaaaagccgatcggcgtgtactcggtgccagcgtccgcgctcaccgggctcaagggcagcgacggatgcgtagtggcgaccgacggcacaagcgtcaaggcgcacgtggccggcagctcattgggccgcacgctggtcacgatcgacggcaaggcgcccgcgagcatcaaggccgatccgggacaggcggtgtgcgatgcgcgttgacctcgaccacgtcggccaccggtacgccgacggtccgctcctgttccacgatctgaccgcgagcctcatgcccgggcacgtgtacgcgctgaccgggccgagcggcgcgggcaagtccacgctgctcggcatcatcgccggctggaccacgcccgccgaaggccaagtgacccggcagggaatcgactcgatgcgctggattttccagaacccgcacggcgtggcccaacgcaccgcgatcgaccacgtcagcctgcccctgctcgccaaggggctcccgcgccgcgaggccgaggaacaggcgcgcacgctcatggaccggttcaacctgacccgggtcaccgaccgcaggttcgcggaactgtccggcggagaggcccagcgcctcatgctcgcccgcgcgttcgcggcccagccctcgctcatgctcgtggacgagcccaccgcccagctcgacatgcacactgcggccacggtcagcgaatccctctcccgtatcgcccgcaacgacacgatcgtcgtggtctccacccacgacccgaacacgcgcgacgcgtgcaccgacatcatcgatttgaagaactaccaatgaaccacaccacgatgaaagcaaccgccgtcatctccgaggcatggcgctccatcaccagcggcgcagcccgcctcgccccggccgtcctcgccctggccctgaccgccgccggcatgggcgtcatggacatcgccgccggctcaaccatcctcgaccaggcaagcgcataccggcaatccggagctgacatcctcgtactcaacgcgcccgacggcatcgacgcggcatcctgcgaacgcctcaccagcctcacgaacgtccaggccgccggagcgatccgcactacggacccgctcaccctcgcggccctgcccgacaccaccacgcccctctaccagatcacccccggcctggccaaactcctcgacaccaaacaggacccgaacacgaccgggctgatcgcatcccaacaagtcgccgaaacgctcggcacctccaccggcggcacgatcggcctcgccgacgggcgcaccgcgcgcgtcaaaggcatctaccaataccccgacgacggacgcacccccggatacgcgtacgcgctcatggaggaaacacccgccaccggcacgttcgacgcctgctgggccaagacctggccgcaaaccgaccggacccgcaacgccctatggtccaccctcaccccgaacgcgaaaaccaccggcgacgatgcacccaccctcggccagctcaacaccaccaaaggcgacggcttcgacggacaaaccctctaccggcaacgctccacacgcatcctgcccgcctgcggcgcactcatcgccctcgccatcggatacctgctcatacgcggccgacggctcgaaatcgcctccgcactgcattgcggcgtacccaaacccgcactcgccacgcagatcatcatcgaaaccggcatcaccatcctgctcgccaccgccatcagcctgcccatcgacatgaccgccgccagactcctcatcgacaccaccgaccgaaccgccatcaccctcaacgccatacaaaccaccatcaccaccaacaccgcctacctactcgccaccaccatcaccgccctccacatcaaagaacgacatctcttcacctacttcaaagaacgataaagcgcagaaaatcattaaaattacgtggtccgtatattccgaaatcctcatcatcgtcggcggacactatcagcacggcatcctactcgattcataggctgccgttttcatttatcaatgctctcacgaagggagcgtaagacatttagcggccacatcgaggtagggggctggccatgctgatcggctcctcgttggtctgcatgacgcgcgggaggacggtatgccgtggcggtgcgaatggcgcatcgtccgacgggctggcgcacggtgtttgtgtcgccgacgttgctgatgttgccgggggtaatattgatgatggcgttgccggcgcgtgttcgggcgaatccgacgtctggcacaagaccgtcatctgctggctcgtcctggtcgcatacctgtacatccaatgcgagaactatgcgttcgccgcctcgaaggcgaggcgcgagcgctgattcctcgcgggccgacgcatcgacgcgccccgagatggaccaaaatccagaataaccgacattcgccgctgttccgtctttcgcccaaggcgtatatctacccgtatcttgaggtgcatcatgtattgtcgcggctaactaaccggcgaaacgcggcatgtttcgcattttgggcgaaaagcccaaggcccacaggaggtattgatgacgttcgttgcacggtcggtgcgctatgttctcagaaaacgagtgcgaaccatagtgctcctcatagtattgaccatcataacagcgagcatgctatccacgatcgcggtttctcgagcagctcaacaggccgccggacgaatcgagaaggaagcggtcggcggattcgtgctggccagcaatctgcagggcagcatgctcacgcctcgcggaggcggcatggtgcgtcccgccgacgtgcgcaggatcgcccaactgcccggggtcgattcgtatatggtccgtcagaacgccaccgccgacctcgtgggggcgaatgtggcgaaggtccccggcggcgatgattacgatgcgaccaaggagcagcagttcggcaacgccgccaacgtcataggcacgaatgattcgtcgaaactcaacgtgttcacgtcgcgcacgctcggcatggccgaaggacggcatctgaaggcctccgacaagtacacgtcgatgatccatgaggatctcgccaaagccaacgggctcaaagtcggagacacgctcacgctcaaggccaacgcctacgacgccgacaacgaatcacattcgacggcgaccgtcaagaccaccatcgtgggcatattcaagggcgacagcgccagaaaggtatccagccgagcggaactgaccgccaacaccatctacaccgatctggataccacacgcgatctgtaccagtacaaggacggcaaggaaatataccaggacgccaccttcgtgctgtccaagggcgttgacgtggagaagaccatggacgccgcaaagaaactcccggtggattggaacaactatcagatcacgcgcaacgaccagtattcatcgagcatgctgcatgccgcccgcggcgtgcgctccatgatgcgcggcgccctgatcggcgtgaccgtctcggccgtgctcgtgctcagtctcatgctgctgctgtggatgaacgaccgccgtcaggagatgggcatactggtgtcccttggcgtcggcaagccctccctggtcgcccaatacctcaccgagatggtgctgatcggtctgccgtcccttgccctcggctggctgtgcgcgcagggaatggcccaatggctcggcaccacggcgctccattccgtgaacgcctccgcggcgaaggagctgagcagcatgggacaggtcggcggcgaccttgaatccagcatgtcggtgcgcaccctggattcgctcacggtgtcggtcgacgggaccgccatgctgtacgtggcgctcggattgttggcggtgatgctggtgtgcgtcgcggtggcgtgcataccgatgctgcgcaaatcgccgcgagacctgtcggagattcgatgatgagcatgaatgtgtggaagcgtgccacgttggcgatcgtacgcaagccggtacgcagcggcatcatcggtctgctgatgctgatggtcttcacgagcctggtggcgcaggtcggagtctcgacggccctgcgtaccatgtccgacagcatcggcgcgggcatgggcatagggtttaccgtcagcgccggcgagaatcccatcagcgccgaggaggcgagccggttctcgcgtatccccggtgtgacgaagaccgcctatgcgacgaagaccttggcgcaggtggatggcgcgcgcccggtcatgccccggcagggcccccgattggactccgatctggccatgcaggtcagcgtgctgggcaccaccgattcctcattgtccgaggaattccagagcggcctgtaccgtctggagcagggccgccatatctcgggcgacggcgacaatgtgctggtccaccgcgacttcgcgctgcagaacggcctatcggtcggctcgacattccgtctccggcaggaggggcgcaacgccacggtgcgtgtggccgggatcttctccggcaacgtgcaggcccaaagccccttgccctcggacacttccgagaacctcatctattcgggtaggcgagtgacctccgctctgaccggaaacgaccagatcggcatgatccgatgcctgtcggataatccgcaggacctgtccgcggcggtcagtcaggccaagaccatggccggcggcaagtacgacgtcaccgacgattcggcccggctctccggcgtcctgcaatccgtgcagacggtgcgtgatctggtgcgcatggtgctgctgtccgtctgcctcgcggacgtactggtgctggcgatggcgctggtcttctggattcgctcacgcatccatgagataggcacgcttctggccctcggcatcggcaagatgcggatcgtcgcacaactcgccatcgaaaccggactcatggcggtggtcgccgccctgtgttcgctgggcaccggcgccatgctgtcgggatacgtgtcttcccgactgttgcgcgattcgggcgtcgcgccgttggaatcgttgcacgtggaggccttgccgcctgagcagacgctgctcatcctgctgctcggatgcgcggtcatcgccgtggcccttgccgtgtcatgcgccgccgtgctgtccaaatccccgaaatccattctttcctctatgcgttaggagtcaccaattatgtctaactgtctgcaactggaccatgtcgattacgcctacggcgcggcgaagatccttgttctttcggatgtcagcgcggatttcgaatccgggaagatgtatgcgatcaccggcccgtccggcgccggcaagagcacgctgctgtcgctgctggccggcctggacgccccctcccggggagtggtccgcttcgaaggggaggacatcgccacatcgggctatgcgaagcaccgtcgagagcacgtgtccctggtgttccaggaccataacctgatcgactacctcacccccgaagagaacctgcggctggtcagcaccaaggccgatatgaagatcctcgaggaactgggtttgagccgtgaggaatccaagcgcaacatcatgcacctgtcgggcggccagcgtcaacgggtggcggtcggccgcgcgctggtcgccccgggccgcgcgatcctcgcggacgagccgacgggcagcctcgacccgaagatgaccgacgaggtgattcatctgctgcagcacgccgcccatcagctcggcaaatgcgtgatcgtggtgacgcattccaagcgcgtcgccgactccgccgatgtcgtgctgcgtctcaggagcaagaaactggcccgggtgtgacccacctgggccgggcggcacccatacaccgcttcggcatttcggcaccccgcaccccggcaccccggcgacccactcgcgttgccggggtgccgtattcgttctgcgacataatgtcgtgataatggaaccatgccagtgatgaatgatgaagtgcccggcgagggcgatttcgacgcggggcgtcgacgtggcgagttcgacgatatcacttggcggattctagcggtggttgcaacacctggtgttttttttggtgttgcaaccaccgctagaatccgcctttctggtgttccccgaatccaggcaaccacccaagctcgtcgaatacttcggcaaggtgctccccctatgccatgaccggcctgctggtggtatatgcgctacgcaacacgccgatcctgaccggttcgcacggcattccggaactcatcgcctgtgccgtcatcacattgctgcatctgtggaagcgcaacatactgctttcgaccgccggcgtcaccgcggtgtatatgctgctgatacagctggtgttctaggagcatgcctggcggcgagtcccgtcaaggatggatgaggaacccgccgcccaacctgccgcagaaccgtcactcgaacggatacttcagcccccacttcgcccgcagctcgtccatgagctcgacgatgcgcagcgaatcggcgtgcggcatctcggcgcactcctcgcgcccgtcgagaatcgcgttcgccgcggcgacgacctgatactcgtaaccggtcagctgcgccggcacatcgtaatgctccgccacggcatggtcggcgccgtacacgtcgatcgcttcgatgttgttgatgttgcggcacaccacgtaccccttgtcgccccaaatgcagcccgcacggtcggagcaggcgagcatcgacgacgtggacaccgccatcacgccattggcgtaatacagcgtggtcgagttctgcgcgtccacgccggtcggggcgtatggcgtcatcgacgtctcgacgcgctcgaccggcacctcgccgtggccgcccatcaccatgtcgatgaaattgagcgggtacacgccgacgtcgagcagcgcccctccagccatcgcgggatcgctcatacgcgccttgcccgacaccggatagcacaggttcgccgaaatcgaccgcagctcgccgatcgcgccggaggccacgatccggtcgacgatggcccgtgacggcatgtagcgcgtccagatagcctccgtgcacagcagaccgctgccgtcggccgcatcgagcagcgcacgggcctgcgcggcgttcgcggtgaacgacttttcgaccaggatgttcttgccggccttcaggcaggcgatgccctgctcggcgtgcaggctgtgcggcgtggcgatatacaccagatccacgtccgggtcggccagcagctcgtcatacgagccatacgacaccgggaacccgtattcggccgcgaacgccgcggccctgcccccgtcacgcgcggcgaccgcatacggcgctaccagaccggcataccgcgggtccgccgccatcgccaccagtgttcgcgccatcgaatgcgcgatgcgcccggcgcccagaatcgccacgttgatgcgcaacccctgcgcttcggcctcggcacgtctgccgttcagtctgctcatcattcctcctcgaacgttccgatacatgttccgatggaatacgcgggtatccccgcgaaaccggctgtcaatgcaccagaataatccggtgaacgatatccgcccggctcgccgcggcgcaatccggcgaatatgacgcgacgcgcccggcagtcatgccaaggcgcgtcgcgtttcatcgcatctcgtcgcgtgccgccacgctccggcggccggccgcatgccgtcatccgatctgccgttccacccaatcgacgatgtacggcgcgacctcctgaatctggccgatggccacctggaactcgtggggcccgccataccagggatccaccaggtcgatggagtcctcgcggccggccgccggcttgggcaggttcgggtcgaaactgcggtacatgtgcacttcggcgcgcttggaggacggcagctgccgcagcagtgcgcgcatatgcgaggccgtcatcggcaggaacaggtcggtttccttgatctcctcgcgcgtgacgcgatgggcgaaatgatgcgtggggatctcatacccgtcggcccgcagcacgcgcacggcgcgcgggtcgataggatggccgtactcctcgtcgctcacgccgctggacaggacgcgcacgcggtcctcccctatcccacgcgactcgaattcggcgcgaaggatgatctccgccatgggcgagcggcagatgttgcccgtgcacacggtcatcacggtgtatgggtgctgctgtgtcatgatggctcctgatggtttccgatgggcgcctgtgcgtaaggcgcccggtgaacttgcgcgcgcggcgattcagccgatcttgcgataggtgacgaagcggtaccgcttgattccgctgtcgtccttctgcgttctcttccaatggccggggtcggcgacctcccacaggccggcgtcgaccagagcgtccatatcgggcgcatacgtgtctgcgtccactgaggtctggatcttcgtcacgaacgccttgctggcgaaaggcagcgcctcctggaagacctgcgctccaccgatcacccagatctcgctgcggtcaagcccgtcgtcgggaatggcctcctgccgcgcgatgtcgagcgccgcatccagatcggtgacgaccgtggcgcccagcgccagatactggggattgtgcgataccacgatgttgtcacgattgggcagcggacggtacttcacgttcagtgactcccatgtcctgcgtcccatgatcaccgggtgagagacggtgagctccttgaaacgtttcatatcctccggcagatgccaaggcatgccgccgtcgaacccgatggcaccgggacggccgtctttgtcgtcagcttcggcccaaatcaggttcactgaaaacgtcttgggaaagtcatcaccccaatcatcggctttctcctgcccggcgaacccgggctccggttcgtgatagccgttgcggctactatcatgctccatttcattcactccttgaatcggactgggacaatagtgtaatggtcggttcagaccgcgaccggtgccttgatggtgggatggtgccggtagtcgacgatcgtaaaatcctcgtactggtagtcgaacagcgaatcggccttgcggatctcgatcttcggatacgggtacggctcgcgcgacagctgctccagcacctggtcgacgtggttgtcgtagacgtggcagtcgccgccggtccagacgaattcgcccggttccaagccggtctgctgcgcgatcatcatcgtcagcagcgaatacgaagcgatgttgaacggcaccccgatgaacatgtcgcacgaacgctggtacagctggcagctgagccgcccgtcggccacgtagaactggaacagggcgtggcagggcggcagcgccatgttctcgacctcggccgggttccatgcgctgaccaccatgcgacgggagtcggggtggttgcggatcaggtcgaggacattgccgatctggtcgatggtgcgattcgggtcttcgggagtcggcgcgggccagctgcgccactgcacaccgtacacgggaccgaggtcgccattctcgtccgcccagtcatcccagatgtgcacgttgtgctcctgcagccagcgcacgttgctgctgcccttgaggaaccacagcagctcgtatgccagtcccttgaagaacacggtcttggtggtgagcagcgggaatccttctgacaggtcgaaacgcatctgctgcccgaacagggatatcgttcccgtgccggtgcgatcggacttgagcgtgccttcgagcatgatccggcgcaccaaatcctcgtacggcgtggggacgtcactgtgaggacgggcggggatacgggtgcggatatctgcgagttgttccggtgtcaaagccatgccacccagtgtaacgacagcggctaacagcccgaggcgagtggcggagacgacggacggcagcgtgcgatggatgcggtagcgtcacgctgtgcgggtaccgtcactgtgtgcgccctcgcacacagtgacggtaccacaaaccccagtgtttccagcggtttccaagaaaccgtcacgccgcgaacccgcacagcgtgacggtacccgcacagcgtgacgccgaaacatggcatgcacaggcgatttcggagatgaaacgccggacgagacgggggtagacgccccaaaccagacccagatcagaccaaagtacccatcgagcagacgtgctcgggccggaggggcgtccagccgaacgcgtatcacgacccatggcgaacgattgtggtctacattagaggtatgtgtgatgcggcaggcgcgtcatgacgactacacgaggagatacgcatgggcaagcgactttgggtcgagcgcaacaaggatggttcatgggatgcgttcagcgatgacggcgctcacatcaagttcggcaagggccgcggagtgttcacccccggagacctgatgaagatcgcgctggcgggctgtgccgcgctgtccagccagttcgccatcgagcacacactcggtgacggcaagggcgcgaggatcgtcgtggacggcacatatgacgccgacagcgatgcctacatcaacttcaacgagcaggtcgtggtggatgccactgacgcgaagctgagcgaagaggatgcggacaagctcaaggaacgtgtcacgcgccacatcgaaaagggctgcaccgtcaagcacacctatgtgcaggagacgccggtgcgcatggatgtgacggttcgccgctgaggcatcgcggagctcctcccctgtcatataacggcacgggggagttcatgctaccgcgtccggcacgagcgccggcacaacaacatcatggccccgccgggcatcgagtccggcggggccactgcatgcatcagagccgaatcaggccttgtgctcggggtcgatggccgaatcgatctgctcgacgacctccggctgcgcggccggcaccggcagctcctcgacaccgccgatggactccaagggcttcggctcgacatcggccggcgagctcggaaccgtgtcaagacgggattccgcggcttcgacgtacttgcggggtacgacatacaccgggccgacggcgtgctggatcagtccctggctggtggagcccagcagcaggccggtgaacccgccgcggccgcgggagccgacgacgaccacgtcatggtcatagctggccttggtcagcgcctgcacggcgttgcccggcaccacggtgcgggtgatcttcagatcggggtaggactcctcgatcggcttgatacgcacctcaagatcctccatgaaggattccatcacggccttgtcgccgtccgatccctgcaccttcggcgcggcggagatcacgtcgagttcggcaccccacatgttggcgaacgaggcggcgatgtccagcgccttcagaccccacttcgactcgtcggagccgaccgccaccttggtgatcgtgttgttcaggtgcatcaggttgccgtcgtcgtcggtatagggcacgacgacgatcgggcagtacgcgtacgcgggcagcgacgagctggtggtgccgagcaggcgctcggccagtccgcccttgccgcgattgccgatgacgatgagattgtagttgcgcgacagctcgacgaacacggacgctgggtcaccggtgacgatcagcgtcgccgcctcgacgccctgctcgtcggcgatggccttggccttggaaagaatctcctgtgcgtcgctgtgcgccgcgttgtcatcacccatcgcggtgtacgtggcgtcgaacgacactgcggcgtagctgggcagcgaatacgcgcatacgatctgcagcgtcaatcccgcatgcttggcaaaattggcggcccaccacgtggccttgtaactggcatgagaaccgtccaccccaaccagaatcgccttttcgttgatcatggcaacctccttaaggtaacaccgatgcagcggcgcatcgggtcatagttcctagaataccgcgtacgcgtcaggatgcgggatgaacatcagtcattttgccgattgagaacaatgccacattcctggcgtcggtgtgtcataacgcgcggcagcgcagcggaagcgggcacggcatcgtcgccgcatcacctgtcgaaaaagcacgacagcgccccaatggaggcgctgtgcagtgcgaaatatcgttcgaagactcttcgacccgaagcaaccggcttagatgattcggtagtactcgaaggaagcgtatacgggcacgatggacacgctcttgccggggcgcggcgcgtgaatcatcagaccgttgccgacgtagatgcccacatggccggatctccacatcaggtcgcccggctggggatcgctgaccttcgtgccgtgagcctgagcccacgcacgctgctgatagtcgatacgcggcaggctgatgccgaacttggagtacacgtactgcgtgaagcccgagcagtcgaatcccgacggcgtggtgccgccgtacacatagggcacgccctggaactgggaggcgtaggcgaccacgccggcgccattggcgctgaccggggcattgaccgcaccgtcattggagacggacgacgagctggtgctgctggtcgcggccgatgcgcgggaacggctgacctccgccgcctgcaggcgagcggcttcggcggcggccttctcggcggccttgcgctcctcttcggccttcttggcctcttcctcggcctttttctcggccgtggacttggtttcgggcacgttcagggattccacaccgccccagctttcgctgccatcggagctgaccgatactgtctccttgagcagatccttacgcgcggtgttcatcttcgggaacgagcgagaagaggtaatcgccttcctgctcgcattatcggaaccggccaaggcgacaggcaccgataccgtgaacaacgccaccgcagctgctgcggcggtgatagtcgaaataatcttcttgcaaatcatcatcggggcatgattgtagcacacaggcatgcatcttcgcctgaaaacactcacgctaggaaatcacgccatatcggcgacatcacgggaaaaccggcaatcttcacacgaccggcgcgacactcccgggagaataatagagatgaatctcactgacggggaccgaagacccgccgaaaatcagtagtggatgtactggaagtcgttcacgttggaaagggtgcgggatgccggcttgccgttcagcgaagcaccgcactccgagacggtgaccgtgccgtcagcgttgatgctctccacgatggcgacatggccatacacggaactcgcgccttcctgacccgcgcggaacaccatgacgtcgcccttgtggcgaggcgtgttgtccacccagtagccgtgcgcacgagcggagttcgcccagtcctgaccattgccgaaatatgatccgacgggcaggccgagctgatggcgacgcaggtacgcccaccacgtgcactggctgaacgcataggcgagaccgctgtcgcccgtggcatggttcgggttgaatccttcgggcagcttgccggcatcctggtcgaccagcaccgcgacctgcgggttgttcgccagggagcgggacagctggctcacgtcgatggcggagttcttgtcgttcagctcccagttgccgttgttggtggtctgcacggatttggcgtcggcgatcgtgttgctcgtcttcacgtcggccgcgccgctcgtggccgcggctgcggtctggtcggaggcgatggggccgagctcggtacgggattcggaacgcgagaccgtcgaaccggtcacgcgggccagctgagtggtcgtcgtggcgggatcgtcggccagcagacgagagttggacgactgctggatattggaaaaggccaaggcggtggccgcagtgccgaccagagccgcaagggatgcggatgacatcatgtacgacttgcgctgcgcggccttcgcggtctcgcggatggcccggcgggtcatcggggcgacctcgttcagcttggctgcaagaacggggtcgatggcgagcgccacggcatcgccgttggccgcccgcacggcacgcacggccctggccgtgtgggaaccccgggaggagcgaaataacgccgaggggctggtgcgctgaacggaatccttattggccttatgcgcagcatgcctcatactttttgctcctttaataccatcgcgatgcggccttccgaagacgccgcacgttcatcacggttgaccagcttaccgcggggtgcggccatcggcaacccgaccgcatccgacacatgaacgccgaccccatcaatccgcatcattggctagtgttgagcatatggacaatatcgtgaacatcccgtcctcaatgaagcccgaagacggacgattcggctccggccccagcaagatccgccccgagcaggtggacgcgctcgaacgcggcggcaagacgctcctcggcacctcacaccggcagacgccggtgaaatccctggtcgcctccatccgtgaaggactcggctcgttcttctccctgcccgacggatatgagatcgcgctcggcaacggcggcgcgagcgccttctgggacatcgcctgcgcgtcgctcatcgccggcaaggccgcattcggcacatacggctcattcagcacgaagttcgccaagtcggcgcagagcgcgcccttcctcgacgaccccgtcatcttcgcgggagaaccgggcacctatcggctccccgagcgcaccgacggcgtggacacctacgcgtgggcgcacaacgagacctccaccggcgtgtcggcaccggtgcggcgcgtggaaggcagcgacgagcagaacgcgatcgtcgtggtcgatggcaccagcgctgccggcgcgttgccggtggatgtcagtcagaccgacgcgtactacttctccccgcagaaggcgttcggctccgacggcggcctgtggatcgcggtgctgtcgccgcgcgccatcgcacgtgcgcagcaggtcgagggcgaagccaagctcgaaggctcccgccgttgggttccgccgttcctctcgctgacctctgcgctcgacaacgcacgcaaggatcagaccctgaacacgccgtcggtcgccacgctaatcatgctggagaaccaggtgcgctggctcaacgagaatggcggcatggcctggtccacggcacgttgcgcgcagtccgccgcgctgctgtacgagtgggcggagcgcagcgaatacgcccggccgttcgtcgccgacccgggctcgcgctccaatgcggtcgtcaccgtcgacctggatgacgcggtcagcgccaaacaggtcatcgccgcgctgcgcgagaacggcatcgtagacacgtccggataccgcaagctcgggcgcaaccagctgcgcatcggcgtgttcccctcggtggagccgtcggacgtggccgcgctcaccgcgtgcatcgattacgtcgtcgagcacctgtgacggacgcggcagcaagagccgcccgatcatcaaggactgaacgctcgggcgggtgccggtgtatgtaccgccacccgcccgattcatcccatgcgctaaggtatataggtatgaaattcgcagccatcatcaatcctgaagtacgcaagccggcaccgaaaccggtgcgcgtcgacctgcgcaagacgttcctcatcggctgcgtgctgtggtcggtcgcgctgatcgtcagcgcgatactgctcgcgtgcgggctggatgtgctgcaattgctcatcatgtgcgcggccggactgatcatcggcgtcatgatgctggtatgggagcatttcgaccgctgggattaccggcgtctcggcaactgagccgtatcagtcccccaccggcagcgacagcgtgaacgtgctgccctgcccgggagcgctccacaccgtcacatcgccgtgatgggcgagcgccgcatgcttgacgatcgccaatcccagaccgatgccgtcggtcgtgcgctcgttctggttggaaccgcggtagaaccgttcgaagatacggggcagatcggccttcggcacgccctcgccatgatcgatgacacgcaccacggcgttcttcccgtccgaagacagggcgacggagacgccgaccgccccgcctgggtgtgaatacacgatcgcattctccaccatcttgcgcacggccatgcgaatctgatcggcctccccgtgaatcatcacggggctcttgccgccgacccgcacctgcaccccggcatcccgcgcagtgccggcaagatcatccacggccccggaaacctgcgagaacaggtcgcaacggttcgcctccgaagccgtcaccggctcctgagccttaatcagcatcagcaggtcagagatcatgcggtcgagccgcacacaggaatgccgcacctgccgcgcgtggttcgacagctgctcgtggctcacgtccgcgctctccaacgaatcggccagccgctccagcgcgcgggtcggttgcagcagctgttcggagacgttcgatatgaacgagtctcgaatctgagcgaaccggatcgactcgctgacatcgttgatcagcacgagcaccagatggtcgccgatgcgtcccaccgtcaccttcagccagttcggccgagacgaggcctctgcggtcaggccgtcatcggcagccgcggcatcgaatccgttcatcgtcatgaactgctccggcgtctgagtctccaggtcgaacgagcaccgggaaccgtccttcatcaccttgtgcaccgcgtcaagcaacgtaggttcgatcagcgtgtcatcacgcaccaagccgagtctataggccgcaggattggcacggaccacctcgtcctgatcgtctaccacgaccgacgccagcgagagcatcgacagcaccagctgggtggagtcatccagatcatcggccggctcgtcatcctcctgacgacggcgcgcgccgcgacgccgagactgcaacgacggcaagcggtcattgctgcgcagcgcgttcatgatgacgggctgcagccggtccgcgatgaaaaagccgattcccgccaatgcggccagcgccaatagcgcgaaaactacaaaaatccataccgacggctgaaactgaggcatggttccattgtctcacaccgagaggcgacatgcggcgaacgtgaattccgggtgaaccagccaatgaattttgagacaatttcaagaacctgaccgccacgcactaggcaaacacagcttatgcggcttacacttgatagaggttccatcaagagcaactacatagcatgaaaggctacaacaatgcgcgttatttttgacgaggagctcaaggccgttgccgatgacctcgatcgcatggtgcaagacgtgcgcaaggccatcaacggggccggagacgccttgctgaagcaggatgtcgaagccgcccagagcgtcatcgacggcgacatcgagatcgatgccctcgaatccagcgtcatcgaccagtgcatccgtctgctcgccaagcagaacccggtggcgaccgacctgcgagtcgtcgtatcgacgctgcggctcgctgcgaccttcgagcgcatgggcgatttggcgaagcacatcgccgaagctgcacgccgcatctaccccgaaccggcgctgccggccgaggccacggagctgttcaccgagatgcagcagttcctgtcgatgaccgccgaccgcatcgtcgtcatgctgcaggaccgcgacgccaaaaccgccgaggagatcatcctcgacgacgacaagctcgacgcgctgcaccacaagaccttcgacctggctctgtccgacaagtggaccggcagccgtcagcagctgatcgacgtcgtgctgctcggccgcttcatggagcgtcttggcgaccacgccgtgtcggcctcccgccgcgtcgtgtacatcgtgtccggcttcgatccgagcaaggagccgtcgcgcgacgaggacggcgccgtcgagtgacgacgaccgcggcgatgccgtcaccggcattccgccataactgaacttctctccacggagagtcccatgaacggcgagacggccacggctgctcgccgtttttgtatgccccgacgggcggtgcgcggctttggaacccggatcatagactccatcgcgacgtcaccgtgcgtgagttgcgtcaccgcgcgcgccctcgcagcgtgacaccccgcacgagtcacgcttcgccgcgctcccagtcagcggaagcgggaatggtgcgaatcggcgagaagacggccacgaccatgcccgccgtggccagcgcacacaccacggcggcgatcagcgtgaacccgcccggcacgaaccgcagcatgccgccgaccacgaccggtgccacggcgccgaatacgccgagcagcgtttcgcataccgaggagacgcccccctcggcctacatcacacacgggcgagttctagtgatcgttgcaacacctggcctaccgcagggaggatcaggtgaccgcgagccaccatgacgacgggacagggacccgccgctgggtgttccaggggcacggttatccgacgaggaaggcgatgtgcgaggccaggcgggccgagtacgtgcgcctgctggccgaggagggcgtgaacttcacccaggccgcccatgcggtcggggtgtcgaaacgcaccggcaaggcctggaggaacggacgcgcccgggccaccggcaggaacgagagaccatcggtggactggtatcgttccaccatggacaagcccaggaagatacacgcccgctatctgggccaggaggaacgcatcctgatcgccgaccggctgcgcctgggcgacggcatacgcgccatcgcccgcctccttgaccggaacccggccaccgtgagccgcgagatacgacgcaacacgaaccccctgaccggatgctacgagccgtaccacgcccagcaatcgagcgccgaccggctcaaacgccccaggcccaggaaagccgggccgggcacgcgcctgtggcgggagatactcgccggccttggacggcattggagtcccgagcagatcggcaaccggctcaggcatgacttccccgataatgaggacatgcacgcaagcgtcgagacgatctaccaggccatctacgtccagggcaagggcgagctgaaacgggccatgcgccagggccgcgcccaacgcaaaccccgtggcggcgcgggtcgcagaccccggttccgggatcccatggtcatgatctcggaccggcccgccgaggtcgaggaccgggccgtccccggccattgggagggtgatctgatcaccggttcggcgaacaggagcgccatcggcaccctggtcgaacgcgccaccaggttcacgatcctgctgcacctgcccgacgggcacgacgcaggccaggtccagcaggccatcgtccgcaagatgcggaacctgcccaggctcctgcgcaactcgctgacctgggaccagggttcggaactcgccctgcacaagcagatcggcgcgagcctggacatgcgggtctatttctgcgacccgcactccccgtggcagcgcggcaccaacgagaacaccaacggcctgttgcgccaatacttccccaagggcaccgacctatccaaataccccgaggactacctcgacgcggtcgccgaggaactcaacgaccggccacgcaagaccctcggctacatgaaaccaagcgagaaaatcctcgaactcctcgacaccgcaagctaacctagaaaaccaagacaacaacaccaaaaacaccaggtgttgcaaccaccactagaatccgccacgtcggggcgtggccggatacgcaaaagggccgctcccatgagggaacggccctatgcatcaggctaatgccaggtcagagaatcacttctggccctgagcggcgacggcggcggcaccggcggcggcggcctccgggtccaggtactcgccacgcggcttgaccggcttgaagttctcgtccagctcgtagagcagcgggatggcggtcgggatgttgaccttggcgatctcgtcctcggacaggttgtcgagcatcttgacgatggcacgcagcgagttgccgtgggcggcgatcagcacggtcttgccggcgcgcagctcaggctcgatggcggactcgaagtagggcttgacacgctcgacgacgttggccaggcactcggcttccggaaccgggtcaccggcgtaacgcgggtcgtggttctgcgcgtactggtcgttcgggtcgatctcgggcggcggggtcgcgtaggagcgacgccacagcatgaacttctcgtcaccgtactcctgacgaatctcggtcttgttcttgccctgcagagcgccgtagtgacgctcgttgagacgccagtcacgctgaaccggaatccacaggcgatcggcggcatccagtgcgatgttggcggtattgatggcacgacgcagcagggaggtgaagacgatgtccggcaggacgttcttctccttgagcagctcgccaccacgcttggcttcggcttcgccctgctcggtcagcgggacgtccacccagccggtgaactgattggtcttgttccatgcgctctgtccgtgacggagcagtactagtttataagtcataactcgcagtctaccgctcagcccggccaaattcgagcctttgtccaccgtttcgccgaacgcttgcgcaggaatactcacaccatcagcgaaatcagcaggatgacggcgaagaacgggggctggaagcaggcgtccgacagcgctttgcggaattccttacggcccgtgctggtcaccatgcgccacggcacgccgatgccggacagcatgaggatgccgccccacggcgtccacagcagcatcaccacccacacgccgatcgcccatgcgacgacgcagcagacgcccagcatcacgcgggcgccacgctcccccatgcgcactgcgagcgtgcgcttgccatgccggcgatcctcgttgatgtcacgcaggttgttcaccatcagtatctggcatgacaacagccccgcgacaaccgcgcacaacacgccgagcacgctgaccgaaccgctcagcgcatactgcgtgccaagcacggcggccaaaccgaagaacaggaacaccgagagttcgccgaatcccgcatatccgtatggatgcttgcctccggtgtagaaccagccggccagcaggcaaagcacgccgaccagcagcagccaccacgcctgtgacaggacgacggcgacgaggccgcacacgcaggccagcagagcgctcaccacggcggcgacgagtacatgcttcgccggaaccaggccggacgcggtcagccgcatgggcttcttggtcttcttctcactgccaccgcggccctcatcgacaccgcggatgccatcggaatagtcattggcgtagttcaccgcgatctgcagtaacacgcccacgcacacgcacagcagcgtgacgagccagaaccgagacatcatcgcctgcgcatcggcggtgaccgccgcgcattgcgacgtgtcggaccgggtctgcgcgcagttgagatcgcccacgatcaccggatacgcgcagcatgcgcccaccgccacggaggacagggaggtcgtcaaggttttcgggcgtgcgccggatatccacagtttcacagtcatacagtccagtgtacgtgcctttcacggattccgtggatatgtcgtcatgatcatccgccgacatcagcacgccccgctggcgggggggctgtcggcacagcatcgatacataaacaggcggggctccacgcacacacgcgtggagccccgccatatcgtttcaatcggtcatcgcccgcagtccgcacgcaaggccggcagcggcccgccgcacgtttactgcaacgccagcggcttgaccagagggaaggtgatggtctcgcggatcgtggcaccggtcagggcgatgagcagtcggtcgatgcccatgcccatgccgcccgccgggggcatgcccacgccgagggcctccaagaagtcctcgtcgatgtcgcaggcctcctcgtcgccggccagcgcgtccttggcctgggccacgaaacgctcgcgctgcacgatcgggtcgttgagctcggagtagccggtggccagctcgaagccgcgcacgtagaggtcccacttctccaccacgccggccttgttgcggtggcccttgaccagcggggaggtctcgaccgggaagtcgcgcacgaaggtcggctcgtatagcttgtcctcgtagaagtgctcccacaggtgctcgacgagcttgccgtggttctcaacgtcgtcacgctccacgccgagcttgtcggcgatctcgcccagatgctccacggaagtgccggggttgtccggcccgccgttcggcacgatctcttcgccgagcgcctcggagagcgaatcatacatgctgatggtcttccagttgccgccgaaatcgtattcggtgccgtcgagcagcgtgaccttatgggagccgaacacgtccatcgcggtcttctgcacgagctccttgaccagctgaccgatggtgtcgtaggtgccgtacgcctggtaggcctcgaccatcgtgaactcgggggcgtgcgtggcgtcgacgccctcgttgcggaagtcgcggttgatctcgaacacgcggtcgatgccgcccacgaggcagcgcttgaggaacagttccggcgcgatgcgcagataaaggtccaggtcgaaggcgttcatgtgcgtggtgaacggacgggcggcggcaccgccgtggatagtctgcagcatcggcgtctcgacctcaaggaagtcgtggtcatcgaacgtgcggcgcagcgaggcgacggccttggaccggttgcgcaccatgttgcgcaccttctcatcggcgatcatgccgatgtacggcttgcgcgtgcgcgtgtcgtcgttcaggtccttgtgcagggcgggcagcggctgcagcgccttggacgcgatggcccattcggtggcgaacaccgacagctcgccggtcttggacgcgatcacgcggccgcgcaggtacaggtggtcgccgaggtccacaagctgcttgaactgcttgagcgagtcagcgccgatctccttcttggagatcatgccctggatcttcgtgccgtcgccggccgacagctgcacgaagcacaggccgccgccgttgcgcagaaacaggacgcgcccggcgatgccgaccacgtcctcggtctcctgaccggcttcaagcttgccgtcatacttggcgcgcacggcctcgatggtgtcggtcacgtcgaggtgcaccgggtagggctgcatgccggcctcaagcatcatcgcgcgcttggcgacgcgcatctgcacctgctcggggtgcgcgagcgggccgaactccttgttggagggatcgacggcctcgtccaaagttgcgccggcgccgatgcggtcgcggatggctgcgtcctgtcgcagcagcatctcggcacgttcgaccgtggtcatgacgggaacagcgggcgccgtctcgtcgtcgttcagggattcgggggtttcttgcgtctgactcataatgtcacagtgtaatgagatggcgatacacgccgagagtccgttgatattccgcggttttcgggatgccacgccacgccggtttggcttgtccgggatttcgttgtattatagcctgcgttgccaaaacgggctgtagcgcagcttggtagcgcgcttcgttcgggacgaagaggccgcgggttcaaatcccgccagcccgacaacatgaaggccagatcgcgtcagcggtctggccttcttcttactggtggcttggcagctcccgcagtctcacactgcgggaccaccacaaccatcagcgacaatcacaacaaacgacacccacgcgcgggcacgcccgcgagatgtgatgaagagggaaccatgaagaaaagcctgcttgccttggcttccggcgcgttcatcctcggcgcggccgaattcgtgatgatgggcatcctgccccagaccgccgaggcgatgcacgtcgatatcccgaccgccggccacttcatttccgcctatgcgatcggcgtgtgcatcggcacgctgattctggtgttcgggcgcaagatcccgccgaagcagctgatcatcatgttcatggtgatcgccttcgtcggcaacgccctgtcagcgttctccgtcaatgcgcccatgctgctggctgcccgtttcatctcgggactgccccacggcgcgttcttcggcactgccacgctgatcgccaagaccgtggccgacaagggcaaggaggcgcaggccgtctccgccatggtcaccggtcagaccgtcgccaacatgatcggcgtgccggccggcacgctgatgtcggagttcctgtcatggaggcttgcgttcatcgtgctcagcgtctgggccgcgatgaccgtgttcctcgtgcttgcctgggtccccgccatcgcgccggtgaaggacgtcggtctggccggccagttcaggttcctccgaaagcctggaccgtggctgattctgggcgcggtgttcaccggcaacgccggcgtgttctgctggtggagctacgtgtcgccgtggctgcagaagaccggcggatacgacagcgacatggtgccgttcctgatgatgctcgccggattcggcatggtggtcggcggcatcatcggcgggcgtatcaccgacaactggcgtcacgcgggaaccgcagccctcgggcaggcgatctccggcgtcggcctgctgctggtgttcctggtgcccggcaaccatgtgagcgccgccatcttcacgttctggatcgcgttcggcctgttcttcatctccgccccacagcagctgctgatgaccgaatccggcaagggcggcggcgagctgctggccggcgcggccgtgcaggtggcgttcaacttcggcaacgcggtcggctcgatggtcggcggcggcatgctgaacttgtcaggcatgaactaccacttcaccgcattgggcggcgtgccgctggcggtcatcgcggtggcgctgctgaccatatactccatgcgtcacgagacgcacaccgacgcgctggagcgtatgcgcgagatcacggtgtgagtttcgcgggatataggctctcaaaactcgcagatacaagtggaatttcgctgaatcaccggtatatctgcgagttttgagagcgggggtttgttatatagctcacatcacacgccgaaaacgtcatcaccaaggcttcctagactggtagaaaccggtttcatggcaaggagatgacatggacgatgatgcactgatggcgaagctgatggccgcgttcgacgatgacgcggcaccggaccaagccggggacgagccccgaccttccgagcagccttttgacacgcaacggttcctcgccgggctcgacgcgatcttcgacgcgcacgccgccgccaaggcagggccgtacctggagcaggccatgatcgacgcggagaacgccggcgatgacgccgggctgctcaccgtgctgaacgagacgatggggttctaccgttcgcaaggccgacacaaggagaaccagtggatcgtgcaacgggcgctggagctcgcgacccgtatgggcatcacgggcaccgaggcatggacgaccaccctgatcaatgcggccaccgccatgcgggcggccggccagtacgaccagtccgaggatctgtacaagcaggcgcaggcgtccagcgagcgcacgctcgcccccagcgaccggcgactcgccgccctgcacaacaacctgtcggtgctgtacagcgagaccgggaaaacgcatcaggccgaggtggagctgggcgaggccctgcgcatactggaatcgtcgagcccggatgccgaaaccgacctcgacgtggcctcgacgcacacgaatctggcgttgacgctgctcgccgaagacaagctgtccgccgcgagttggcatgcggcgaaggcgttggagatctaccgcaacggtcatcttgagcacagcgcccattacgcttcggcgctggccggctacgcgcaggtacgtttccaccagcatgattacgggcaggcggtgaacctgtactgccaggccctgcaggtcatcgaggaatgctacggcaaggacactgattattaccgcatcaccgagagcaacctgcggcaggccgaacacgaggcctccgagcatgcccccgcgatgtttccggatgtttcacaggatgtttcacaggatgcgagcgcaggtgggaatggttccggcacgcccggcgcagcacccgccggcaccccatccgccgccgttccgtccgctaccgcctcacacaccggcacctcacccatatgcggcctcaagctggcacgcgaatgctggaacgcctatggcaaaccactcatcgccgacaaatacccggaatatcaggggcgcatcgcggcgggactggtgggccacggatcggaatgctacgggttcgatgacgatctctcgcgcgaccatgatttcggcccacgcttctgtctatggctcaccgacgaggattatgcggcgatcggcgagcgccttcaggccgattacgaggcgctcccccaatcgttcatgggatacggcccgcgcgagtccaccgccagggctcagggtgcaggcaggcgcgacggagtgttccgcatcggcgatttcttcgagtcgatcaccggataccgtcaggcgccaagcaccaacaacccgcacgagtggctgatgctggatgaggcgacgcttgccgccgccaccaacggcgaggtgttcgccgacccgttgggcaagttcctcgacacccggcaggggttcaagaccatgccggaggacgtgcggctggcgctgatatccaagcgtctgggcatgatggcgcaggccgggcaatacaatgtgccgcgcatgctcgcgcgcggcgacggtgcggcggcctggctgtcgatcggcgagttcgtgcaggcggcggcatcactggtgttcctgctcaacaatccgatcaccgtgggatacctgccgtattacaagtggcggttcgccgcgcttcggcggctgtcgtcccgcatggcgacgaggctcgccgatgtgtgcgggcagctggagacgctgctgcggctgagctccgccgcctgctatggcggtgccggtttcggcgagggcggcaaggggtcggcaccggtcgccgagaagatatcccagaccatcgagcacgtctgcgccgaggtcgtggccgagctgcgccgagaaggactaaccggcagcgacgagacgttcctggagtggcaacggccatatgtcgaggagcacatcgccagcgacgcggcttgtctgcattccctgtgacagggcgtgaccggcacgggagatgacggcggcaacgacgataacggacaacgggaaagagacggcggatgagcgaccagctgatcgagcggatagtgcgtcatgaatgggatcagttccagcgcacgaacaacgagggcgggcgggccgcctgccaaggcaattggccggtgttccggcagatgcgcacgagccagttcatgacatggaccgatccgctgctggacagttatctggccgatctggtcgaagccgagcgcgtcgggcgcaatctggtcacggagaagtacggtcgcatgatggagtccacggcaccgcaggatttccatgacaacatcgaaccgtacataccccggttgagcgacgaacgtatcgcgacgcaggagcatgtcatcgcaacgcaggtggcgtgggccgaggacttccgcgcccgctacccgaaactcggccgggccatgcgcgtgctgcgcaccgcggaggacaccgcgcaatccacgtcgttcgaaacatatctgcgcggggagctcggcacctactcggaacgcacgatggccctgtaccggcgtttcgtcgacgatctactccgaaagggtcggaacctgaccgaggagacgatcgcccacaccgtcgccctcgcaggtttcgccgatctcgccgaagcggaggccgcacagggctgacgcgggaatcggtgccttgccggcagggcaccggcaaggcaccgatcgatatgtcactcgtcatggggcgttcgtgcgttgcgcgctatctttgccagagaccagatgatggcgatcaggatcagtgccccgccgaccaccgcgcacccgatggcgaacatcacgcggggatccatatcgaaccatgcgagcacgccattggggaacctcactccgaacaggatcgccaccgcgccgaccagcagcatgaacacacccaatgtcagtgtggcggcgctcggccctgtcttgcggatgaccggacgcatcggcacgtcccgcggcacttgcacgtaatttgagcccgcgcccggctgggcccagggaccggccggagcggcgtatgcaggacccgcatccgggtggttcggtccgtatccgtcatgctctcgcgggggctgcgtgctgtacagcggaatctgctgaggtgccggaccgggctgctctgtatcacccgcggcgaaggccgtggcggcatcaggctgttgcgtggcgcccgcgcctgtggatggcgcggcggcaagaggctgccctttgtcaggaacatcgccggccgttgtggctccggccggaacatcgccggttcgctgatcggaagcggcggcgggactcccgaatgcgtcggcggcaggctcggtctcggtctggccgtcatccacgggggccgccgattcgtccgaaaccgccccggccgcaagtggttcggcagacaacttctcggtcgacgcggagtcaaccggcaacgacttggtctcggtctgcggcaccgcgaccttttctaccggcatcgcctctgtctcggcaaccggcagcgtctgtgtcggctcgaccggcaacgcctgcgtcggctcgaccggcaacgcctgcgtgacggcagaagcctgttcggacacgccgccgaccagtgtcggcaaagcctcggtctgctcgaaatccgcaggcatcgcctcggcattcggaagatgccgtgtcatatcgtgatcgtcattcatgatgtgctccttgtatcattcgcccgcagtgctcacagggcgtcatcggatgagcatccgccgctgtcatcgacataacggacggccactttcccctcgatggtgtacggcacgttgatgatcagttcgggcccgccttcgggaatggtgctgtaatcgaggttggatgcgccgccgtcgcacgccggcttctcaccggaacggcccgagaacgtgttgtccagacgcaggaaatcgtatccccactggtttctggtgatcgtataccggcctccgatagaaccgacgagccgatacccgtcgctgcgcttgccgaacgcaaagctgcatccttgcggcaaagtcagaatcacccgagcccgataggccgagatgcgcaggtccccgaccggacacgtcgattgcctgacctttccgtcgacatccgtcaccttgtgggggctgatgccgggcacgccatctcgcgtcagatcaatgctgacgcggtcgtcgccgtaattcgcgccgacgaaccgcacgccctgttgcaatcgggcgatctgctgatcggtggcgccatatttcgtgactccgcgaacattgaccagcgtgccgccttcggactgcatggcatccaccgtatagctgtaagcgacgttgacgcccagtacgcagaccgcgacgaacgcggcggtccaggcgagcggaatcaggcctccggagcggcgtcccatcaggccaagcaccgttatgacagcacccagagccaggcagacgccgccaatccacagcgtgagcacacgggtcatcgattcgatggatgagttgtcgtttgccagcatcagaaccgcaccggagacgagcatcagcccgatcatgccgatgacgatggcgaaaccggccggcttgcggcgctcgtatttcggtggaagaggccccgccgatgggcgatacggagacgactggtacggcatgggaggacgtgcgggccgatcggcggtatggggctggccgaagccgtatcccggagcgggctgctggaacggctgacgcaccgacgctacggaggactccgctgcacttcccgcggtttccggcgcggtgggccctgatgagccagccgtgccggcatcggccgcctgctctcccgtgtccgcaccgtcataggcgtatgacgaggccggccatccgcgccggtatgagccgttctcagaatcgccggtaccgctggcatcgctgacgccgctgcccgacccgtatccgccatgccgccggttggcgttctgcaccagggcccacagcaccagcgccgcgcacagggccgccgcgagaccggcaccggggacggcgaccgccagcatcatcatgattatcacgccaagcatgttccaatcccagcgcccgtcgatcagctcctcgccgaggatacggccatcccgcgcatcgggcagcagcgcccatgcgatggcatacagcgccaaaccgaatccgcatagcaccacgctcgccagcaccagtgcccgcaccagagtcgggctccatcccacgcgctgcgcgatggcgctgcacacgccggcgatccaccggtcgtccccgcgctccatcgcgctgccgcggatccacgagaagaaccggtcgctctgccgcttcggcttcggctggggtccgggcgcaggagagccgtacggatttgaaccgtacgaatccgaaccattcgtgccggggccggcggcgccacccgcgtcataggcatacgttgtatcgttcatgcttccattacagcagcaaccggccgccgcacgcatcgggggacaccctgattgttccctgaaccggggcgttatgccccatgtcgtcttccccggaggcgcacaatgggaccatgatccagccgaacaacccataccggcagccgcacgcgccccgtcggacgcaatggcaggcccgccgcgcccaaccgccgtccgccgcgccgagcctgccattgatgcgcccgcggaacgggcgcgtcctcgtcggcgtgtgccgtggcgtgagcctacatctgggagcgcccgtatggctggtgcgactcgcgttcgccgcggccgctctcgcgttcggggccggcgtcatcgcatacgtgttcctgtggatgttcatgccggtcggcgatcccgtcgccgccgcgcaggccatgtcggatgcggcctcgacaggtttcgccgagccgctctcccgcggtaatgcggcatacgccggcaccgcgggtgacagtggccgcagcgacgccgacgactcctcggagggactggcggcggctctgcgccgcgccccgaaaccttcactggtggcattggccggtctggtgttcatcgccataagcgtgctgctgtcgtttgccggcggacgggagctgatcgtgccgctggccgtcgccgtcggcggcctcggactggcatggtcgcggtttgacgcggacgagggcaaactgccatcgatgcttggcggcatcgtgcttctgttcgtcggctatgcgatcttcgtgttcaccagcacggttccggggtggggcgcgtcccctcgccgcatcatcatcggcgggttcgtactgctggccggcacggctctggcgatcgtgccttgggtgagcacgctcatccgctccctatccaccgagcgcgcactcaaggagcgtgaagaggaacgtgccgacatgaccgcgcacctgcacgatggcgtgctgcagacgctcgccctgatccagctgcacagcgacgacccgcagaccgtgttctcgctcgcccggcagcaggagcgcgaactgcgcgaatggctgtatcaggaacgcaccacatcggaccgttcggtcagcgccgggctgaaggccatcgccgcgcagacggaagacgagcacggcaaaccgatcgaagtggtgaccgtgggcgacgcgaggcccagtgcccagaccgacgcgctgctcgatgccacgcagcaggcgctcatcaacgccgtgacgcatggcggcgagcccatctccgtgtattgcgaggccggcgccgacaaggttgaggtcttcgtgcgcgatcatggcgatgggttcgacgtgaacgcgattcccgagggccggctcggcatccgcgagtcgatcatcgggcggatccgacgacggggcggtacagtggagatcgtatcgaggccgcattggggcaccgaggtgcgcatgcacatgccggtcgcaggcggacggcaaccgaaccagcggggcgatgccacgaacgccggcgggcagcatggacgaccgccatccggcgcggcatcatacacacgcacgcagagggaaacatgattcgacaggtgaagcatatgggtcaggcagacagcacaagcatcggaccgacatcaggagcggatgcgaggcaaggggcggccggtgagttcggcagcgtggagtgcaacgacgtggagtccggcagagccactgatacggataccactccccgcgaagctgcggcgacgccgattcgcgtggccgtcgtcgacgaccatgagatgttccgcgccggtgtcatcgccacgctgcagccgtacttccacatcgtcgggcaggccgccgacgtggaaggctcgatcgcgatgatcgccgacatcagaccggacgtggtgctgctcgacgtgcacgtacccggcggcgagggaggaggaggcgcggagatcctcgccaaatcgcagccgctctcccccgcttccgcgttcctggcgctgtcggtgtcggattcgccgcaggacgtcggctcggtgattcgtgccggcgcacgcggatacgttaccaaaaccatcaccggcgacgatctgatctcatccatcaagcaggtgcacgaagggtatgcggtgttctcgccgaaactggccggattcgtgctgtccgccttccagggggcgccgatggacggggccggcggcgcgcggggccgcgacgaggagctggacctgctgtcaggccgcgagcaggaggtcatgcgcctgatcgcccgcggatacacatacaaggaggtcgccgccgaattgttcatctccatcaagaccgtggagacccacatgtcaaacgtgctgcgcaaattgcagctgtccaaccgcactgaactgacccgctgggcagccgaccgccgcatcgtatgaggcaaggcacgaccggcgcggcgacatttccatgccgacggtgaaacggacgccacccacgtagagcgttcttcatacactggtaacgaacaaaaccctatcctcgtcggaaggaaacagcatgaccgctgaagcaaacgtcggtgtcgtcggactggccgcaatgggagcgagcctcgcccgcaatctcgcccgtcacggcaacaaggtggcggtgttcaaccgtcactattcgcgtaccgagaaactcatcaccgagcatggcagcgagggcgagttcttccccgcgaagacgatggaggaattcgtggcatcgctgaagaagccgcgcaccgcgatcatcatggtcaaggcgggcgagccgaccgacgcgatgatcggccagctggccgatctgatggagccgggcgacatcatcgtcgacgccggcaacgcgcacttccccgatacgatccgccgcgagaaggcgatcagcgcccgcggactgcacttcgtcggctgcggcgtgtccggcggcgaggaaggcgccctgctcggaccctcgatgatgcccggcggcagcgaggagtcctggaagacgctcaagccgatcttcgagtccatcgcggcgaaggccgagggtgagccgtgcgtgacgcatatcggcgagaacggcgctggccatttcgtgaagatggtgcacaacggcatcgaatactccgacatgcagctcatctccgagagctacgacctgatgcgtcgcgcgctcggtatgacgccggccgagatcggcgacgtgttcgaggagtggaacaagaccgagctggagtcctacctgatcgagatcaccgccgacgtgctgcatcaagtcgacaagaagaccggcaagccgctggtcgacgtgatcgtggatcacgcgggcatgaagggcaccggcacgtggaccgtgcagtcggcgcttgatctggccgtgccggtgaccggtatcgccgaggccgtgttcgcgcgaggactgtccgggcaggccgagcttcgcgccgaagcccagaagcaggacttcgagggaccgtccggcgtggtgccgatggccgaggaagacaaggtcgcgttcatcaatgacatccgcgaggcgctgtacgcttcgaagatcgtcgcgtacgcccagggcttcaacgagatcaccgaagccgccaaggtgtatgactggaagatcgatctggctgcggtggcgcgcatctggcgcggtggctgcatcatccgcgcaaagttcctgaaccgcatctccgacgcgttcgagaacggcgaagccaacgtgtctctgctgttcgccccgtacttcaaggacgcgatcgagactgccgagcgctcgtggcgacgcgtggtctcccgtgcgattacattcggcatcccggtgccggtgttcgcctcctcgctggagtacttcgacggcctgcgctccccgcgcctgcccgccgccctgatccagggccagcgcgactacttcggcgcccacacctaccagcgcaccgacatgcccggtgctttccacacgttgtgggctgagcctggccgtgaggaaatcattgcgtgatttccggtgacagccgcgaggagacaccgagcctcgcgaagcgagaccccaatcgtaggggccgaaggcgagcctggtcataagcaaacaccgagcctcaccacaagcccctctctaccgctcgcagatcgaacgcgaaccatacgaatgatggcgcaggctcccctaggggcgtctgcgccatcgtgtttcatcggcacaccattcatatcgtgtgattcccatttttcacacagacgtttttcgcgcacagtaatcgcaaccagccgcatcccaacatcaccaatcaacgcccagtcaccgccggcggtgcatatcctcctgtacaacgcgcgcattgtaggcaaacgcagcagttgtacatacaccgtcccgagagacctcgcacaccattcctcatttcgttggaattccaacgtttccaggaactccgtcggtgtacaacagtgggcgcaatcgttttcaacggctgttgtacagattccgccccgtacaacgcgcgcattatgccatttcgcgggagttgtacacgcatcggcgtcgcaaccctgcgcgcttcttgcgctgcatcccattcgcatgccggaccgcaccgggcacgcaatgaaccctcgggcggagtgaacgaaattcgcaatacgaccggattgtccagtacgatcgtcgaaccgcatcgccatgattgacagaccggcctcaatctcatgccatgatgaacaccaatcagatcatatttcacgacgggagacgtggcacgaaacggcaaaaccgtgcatctttgccgtttcgtgccacggaatcctcgaattgtctcgctatccgaaataacaatcttcaaataccgaactatccgatagccgagacaaacctcacagcttgctggcggcggcctggtcgatgtaccagatgagttcctcgccgtcggcgaaggagctcggggcctgcggattgcgcggctgggcgaaggcggcggcgaccgcatcggccttgcgctccccggacgcgaacacccacgtgtgccgcgaacgggcgatcatgggaacggtgagcgtcacgcgcagcggcggcggcttcggcgaatcgcgcacgccggcgaccagcacatgcgggtcgtcgatcagcacttcaggccggccggggaacagcgacgcgaaatgcgcatccgggccgacgccgaacaacgcgatgtccagcgtgggctcctcccccagctgctcgatcagctccttttggtaggcggcggccgcatcggccagcaccgcatcgttctcctcgtcggtggctgcggcgatctgtgcggcgtcgcgcgtgtcagcgggcatctcgtggatgttctcctccggcatcagcccgcgctccaccaggatgttcaggaaccgccgcgcctgcttggcgttgcggtcgtcactgtcctcgggcacgaaccgctcgtcgccccaccagatgtgcacgcgcgaggcgtccaggtcatcggccagcgggtcggtgccgatcgcgcgcagcacgcgattgccgtcggtcccgccggtcagcgctatatccacgcggctgcgccccggttcggcgagcaggttcctgatcgtggtcagcacgcgcacggccacagcttgcgccagaacatcggggttcgggcatgttacggtttttctttgcgacatcagttacagctcctttgtcgttctgattcggtcttcacgcgcccgggcatgggcgcgtgacggttccgtgacgctcacgcatcgtcgttcattcgttgattcaccgattgccgtcgggccggcgccttgcggtcgagacgccggcccgacagtgcttattcggcaggatgaatcagattccatccctgggtgatgacttcagcatacacttcatccgggtcgagctgacgcagctcttcgctcaggcattcctcaagcgtcctcgtgggcacgctgatggattgcggcgactggccaggcgtgctgatgacggcgatgccctccttcgcgtccggccgctccagactgagcgtcccgtccgcgcgcgtcaggtatacgccggtcacggcggtcgcgccgggcacctcctccatgatgacgggcacgttgagcttcagccgcagccaggccgccagcaaatccatgggcaggaagcccttcggaccggagaccttcaccgtgctgatcggcaggtgcggcggctggtcgagcatggtggcgagcatcgcacgccacaccgtcaggcgcgtccatgccatgtccacgttcttcggcgaccagttgcggcgcagatcctcgatggtgcggtaggggttcgacgagtgcatggcgtcggtgatgcgactcctcgccatcgcgccgagcaggtccttggacgggttggccggcgcctcgttcggccaccacgccacgaccggcgcgtcgggcacgagcagtgggatgaccaacgtgtcgggatgatggaccagcccaccacgcgggtgcagcacgatgatctcaccggcaccggcgtccgcgccgaagcgcacctgggcgtccagattggaattgtcgtacgccgcatccgcgtcctcggcgggcttgggcgcaccctcgacgggcttgcgcgcgccatttccacgccgcggggagatggcgatgacacggcacgggtgctcgcggctggcggcgttggccagttccagcgcctgctccagctcgtcctcggtggtggagatcagcagcgtcagcacgcggccggtcgccgactcgccgcgctcctcgtgcaactcgtcgatcttctgcgatatctcgcgggtgcgggtgttcggcatttcgataatcatggcatcctccagtggcgtccgtcgcgtgcgagcatttcatcggcctccgtcggcccccacgtgccggcacgatacggctgcggctgaccgagcgtggaccagaattcctcgatcgggtcgaggatcttccacgacaggttgacctcttcggtggtcgggaacagcggcgggtcgccgagcagcacgtcgagaatcagtcgctcgtatgcctccggcgagctctccgtgaacgaacggccgtagctgaagtccatcgagacgtcacgtacctccatcgccgtgccgccaggcaccttggagccgaaacggatcgtcacgccctcgtcgggctgtacgcggatcacgatcgcgttcttgccgagctcgcgtgtcgcggtcgactcgaacggcaggtgcggcgcgcgtttgaacacgacggcgatctcggtgacacgcttgccgagacgcttgccggtacgaagatagaacggcacaccggcccagcggcgggtgtcgatgtcaagccggatcgccgcataggtctcggtggtagacgccgggtcaatgcccttctcctccaggtatccgacgacgtcatgcgagccctgccagccggcggcgtactgtccgcgagcggtgtgtgcggcgaggtccttcggcaaacgcaccgcggagaggatcttcgtcttctcggcggtcaggtcggaggcggtgaacgagaccggctcctccatggcggtcagggccagcagctgcagcagatgattctggatgatgtcgcgcgctgcgccgatgccgtcatagtatccggcgcggccggccacgccgatgtcctcggccatcgtgatctgcacgtggtcgacgtagttggcgttccagatcggctcgtacatcgcgttggcgaaacgcagcgccagcatgttctgcacggtttccttgccgagataatggtcgatgcggaacacgctcgacgggtcgaacacctcggagaccacacggtcgagctccttggcgctggccagatcgtggccgaacggcttctcgatgatcacgcgtcgccatgcgccctcggacgagcgggccagtccgcagtcggcgagctgacgcgccaccacggggaacgcccgcggcggcaccgacatgtagaaggcatggttgccgcgcgtgccccggtcgcggtccagttcagcgaccgtgtcgctcaaccgcgcgaacgccgcggagtcatcgaacgtcccctgtacgaaacggatgccctttgcgagctgcttccacgtcgattcgcggaacggggtgcggcaatgctgctgcacgtgctcgcggacgaaatccctgaaatggtcttcggtccagtcgcggcgtgcgaagccggtcagtccgaaactcggcggcaacaggccgcggttggcgaggtcatagatcgcgggcagcagtttcttgcgcgacaaatcgccggtcacgccgaagatcacgatgctgcacggtcctgcgatgcgcggcaggcgcaaatcgcgcggatcgcgcagtggattggtccacgcggttggcgtagcggaaacggaatcagtcatacgcaccatagtagtgatgcgcgtgcatctcatggcccattcctctcagaaagaaccatgcaatgcatcatatcgcgggattttggcgcggcgagaaccgctccgggaccaccccagtcgctacgcgacagtaccaagctggcgtcagagcgtgggctggtccgtctccccgctctgctcgccggtctcgccctcatcctcccgcagtccggattcgagtctccggttgcgttcgcggagcctgtcgttctccgcggtcagctcgtggatgtaccggatctgctgcgctatgagcatatcgcgcaggtccttggcctccgatccaccgaaattctcgcggatcgtggccgcgcgaatcggcgccggcggaatcagcggattgccggtacgcgggaacttgtcagcggatatcggctcggcgtcgtcatcagccggttccatcatcttccagcgcgcgatgcaccgttcgatgcgcttgtatccgataagcgacgggtcaagcccgacgtcgcggaatatacccgtcggcgagtcccccgcacgataccgctgcatgcagtattcgcggaactggtcggtgtatcggatgcggttccgtccgacgctgttcacggcaggcagtgaacgcaggtagtcaatctcgtcgtcgtcaaactctctgtctttcatgatggtgccctccagcactcttctcatcgatagagatgaacatgaaacggaggttcgccgggattcactgcactgtcttccccgcagtatcctccgaatcgggacgcccgccctgcctcgtgaaaggcaggcggatggccgggtcagccgccgatatgcgattcgcggcgtgcgcggttcatcatcggcgatgtgcctggcagccgtgtctcgcccaaagcagtcgcgacggatgtcaccgcggcgtaggtctccgacttcacagggacttccgagggttcgggggtgttcggcgcgtcgggggtggaggttttcagcacgggcttggcatcggccatggaatcgatcatgtgaccatcgacttcgccggtcaggatgacgtcgacgccattggcgatgtcaagcgttgcggccagagcgatgttggcggccggagcggcggatccggccttggcggcggtcagcggggcctcatcacccacgcgcatgactggggattgcgccttgtgcaccgcgtttgcggcggcggcatcgcctgtatatttgctggatgatattgataatcgttgcctgaacctgacgacgaagcgtcgattttcccgaaacatgatatatccttcacttcttgcttcgggagggttcatcctacgcaaaaagcgcaaaacaagcccccccccccccgtgatttcgaagtgtagcgccggcgggaagatatttgggggactatgtttctaaggggttatgacggggagttacgggggtgtctttggcggcgcgatatggtcatgcaggagaccatgtgtgtgcgagcacgtcggtatggccggtcaccccatacaggtgcccggccataccgcagccggtcaccggcgacgggagcgcgccgtcgtgatggagaatcccgcggcaagcatgatgcatgccgtcactgcgagcagcagcgtctgggcgcccgtcttcgagagggtttccgtgcccgccgtgccgggtttggaggtatcggcgttgccgccggcgccgggtttgacgccaccgggacgctcgggctgtccgccgctgccaggctgttcgggatcctcgccacctcctggttcctcaccgccgccgggctgcttgcgctccagcccgtcgcgagcctgagtcagggcctttacggccttgtccagatcgccctgcgtggtggatcgccgtccgcactcctcctgcgcggcggccaacgcctcggcgaacgccttccacgattcggcagtgtaatcgccttccctgagagcctgagccgacgcgatggcgtcggacaacgggccacggtccagacgcgcgtcggacagcgcggcgatggcatcattcagccgtgccgcaagggcgtccacgtcggactgggagatgtgcgccatgtcggtggctacggcggcggcaagagcctcgcgcatcgtcgcccacgcagccctgtcgtactgcgattcgaccagaccgttcgccgcccgcttcgccgcatccaacgcggccgcatcgatgtgcacgattgactcgttgaacgcggtcgtcgcctggcgcagcgcgtccgccgcggcgtccaccttatcggcgtctccggcggctgcaccgtgtgcggccttggcgtcgtcgatggcctggcgcagagcgtccgcggcgctttgcggatgctgcccctcgtattcgccgacgctgcccgccgtctgcgcgtcctccagcgtcttgaccgccgcatccagcacgacctgatagcgctcctgcgcgtcaagctgcgcgagcgccgtgtcggccgaccgccgcaacgcagccgcggcgttatcgagatcctgttgtgtcaccgtgccgtaggcgtcggagacctgcttggcgcttgccctcgcctcggccaatgcggccgacgacgcaggcaggccatgcgcgtccagagacgcgatcagcgccgcggcgtcatcgatcgccacatacagcgcgttgcggtcgagcgacacgtagccggtgcggtagaactcggacaccgcgtcttcgacggtcgtcgtccaccggccggcctcgcgcgaggtcagtccggcgttcagcgccgcccgcgcctgctccagcacgacttcgagcttggtcttcgccgcccgggtgacgttgccggcgtattcgccgacggtaagcttgccgagcgcggtctcgacggacgagaggtagctttccagagacgcccctgcatccgcctgatacaggtacaactcgttgatggcgacggggttctcgttgagcacggtgatgcgtaccgcgtcggtgtagacgggctgtgcaaggcgggccacgatctccggcttcatctgcgcattgccggaatagtcggtcagcgtcttccactggtcggctgcaccatcgcccgcaccgccgccgtcctgcggcaccacgcggtattcggccttgaaccgcaccggctcgctgttaccggaggccagcaggccgagcatgttgatgtctgcggccttcgcgagcgtgaatgtcagggtcttgtcggccgtggccgtcaaggtggccgcgctgtcgcggtctccgtccgtcagcttggcgaggtcggcaaccgtgagcgtcgagccgtccgaggccgtcgtcttggcgtcgcgagccacgttgccgggcgtcgcgtagacctcgatctcggacaccagtggccatgcgggcgagccgctggaggggatgcgggcgttggcgatgtccatgcggatgcgtgtgatgctcatgccgaccggcacgtccatcacgatgccctgctgtttgcccaggtcggcttcggttcgttcggcgaccgtatgttcgtggccgttcgcgtcgatcaccttcaacgtgatctgcatgctgcggtcgggctggccttcctcgaacttgagccgtatgctgtcgacctcacgggccttggcgtagtcgagctggaaccatgccggcgtggcgccgtcgcgggacacccatgcggtcgccttgccgtccaccagcgcgccggcgttctcgggcgcgtccttggtgggcgacgacgtgatggcggccgaggtggcgatgttcacgccttcgatggtgtcgccggcttcctgcagcagttcgagttcggcgagcgccggccatgcggtgccgccgaccgaccctgtgaactccacggtgacgtgttcgacctcctcgccaagattcgccgcatacacctgatcgagggcgccctggttctgcgtctcgtcgatcagtgtccgctcggtaccgtcagcgagccccgcgacgacccggaactggaacaggcggccggccgtctcgaacacgagccgcacgcggtccacacgctgcgccgacgccaggtcgatccgataccagttcgggtcggacccgttgccgacccacagcgtaccgtcgtcgccgtcgttgccgttcgacgcgggccgctcgctggggccggcgcttgcggcgccgccgagcgccaggttcgtgtactcgggctgcggctgcgcggctccccagacggacagctcgtagatgccggtcaggtcccgcccgttcgtcgaatgcaacttccaacgcaccttggagccgagtatgtcggcggcgacctcgttcttggagctgacggcatcggcttcgctgcggcctatctcgacccatcccgagccgttccagacctcgatctcgtagcgcagcgggaagtcggccgcgatctgctgcagggtgatgccggcgccggtgatcgaatacgtgccgccgaggtcgaccaccagcgtggcgtcggtcttgcccgtctgcgtccagccggtgtcggtgttgccgtcggtcacgtccgggacgacggtgccggtgtcctcgtcggtcacgtcatgtcccagcgccaggttcgtgcgttcgaccgcggtgccaccgtcggtgacgtcgtccatcgcggtgaccgaatactggtcgaggatgatcttgccgagcgctttctggtcgacatcatccgcggcttcggtcgcgaaaccatacccgtcctcgtcgcttttgcggttcgcccactgccagccgtagtcgaaccagtccgggtcggtgaagtcggtgccgtgctccagtttgttcagccggttgtccacgtacgtcttccaccgccgatagtagtagtcgccggtcagcccggcccactggcggttggaatagtcgatgagcgagccgttcttgttcagaccccacgtggtgacgagcgcacgcgcgttgagctcgaacaggtcggcggtccaatcgtccgcgccgtcgagcatcgtgcgggcatcgtcgatccatgcgcccacgaggaagtcgtccgagctggaaagcagcttgtcctgcgccttgatgatgtccagcatccgggacgacagtgtccggaacgtctccagatcgcccgacttgtacgcctgcccggcgagcggctggtattcctggaagctgttggccagcacctgccgcatcacgtcgacgtaatcgtagcggaagccggccgagtccttgtacgagtcatacgcctgctcgaacagggccgcggccttctcgaactgccgcttgtcgtaatctatgtcgctgtggccccacgtggacgccgagccgatggtgttgtcggacgggcgggcgttgatgatggattcgctcgcaccctgatagtattcgccgtccgtgtgcttgtaggcggtgtcaagcaggatgtcccacgccttctcgatcgtcccgtcggttccgccgtaccggcgctcggcatactcctgcgtccaggagcgatagtcgaccggatcctgctcccaggtcatgtcgaacagcagctcgtagacgatcggcgaattgtcgatggcttcgggcgtgatgccgatgccgcgcatataaccgctggagttgtaggctttcgtgatgtcctgggagatcacctccggcactccgtcaaggcccatgcgtccgccgaagttgtgcaacatgttccacacccacggcacgccctggttctccatcgcgctggcctgcgagcgcaggtcgctctgcaggtcgagcacgagcgcctggcccttgtccgcgagcccggagagcttcgtctcgtcgatgccccactgccactgctgcatcacccacacggccgccgggtcatggtcgagcatcttgcgctgcacggtgcggtagatgtcgacgatgtcgaagccgtctggaaccatgccgccctcatggaacggatcgaccgcgtagtagttcgacaccttgccgaacacgttctcctgagctttgtagaacgtgtcgccgaccttctggaagtagtcctccttgccggccgccttgtcggcgtcggtcagatacgtcttgatcatgtacgggcggtcgaaaccggaccatgtgccggacgacgcggccaccgacgtcgggttcttctcctggaagtcggccggcacctgaccgccgaagccctggatgaccggcgtgatgccgtacgcctgcatgcggtcgtggatcctgcggccgagctcgacgcgctgctcgaaccatgcggcgggcagggggcctccgaccgagtacaggttctgcatgtagaaccatgcgtagtatcccggcccggacaggtattcgcgcacctcgtcgtcgctgtagccgtattgggtgagcgtctcgcgcagcacctcctcctgtccgacgatgtcgagcatgaggttcacgccgttcatcgccgcccagtcgaggaacggctcgtaatcatcccagttccagaacgccatcgtgtacgagtaggtgcagaagttgagcgcgtaccggtactcgtagttcgtgtatttgaggattttccggccgactgcaggcaggctctccggcatggacagctgggagccgaacagcgggttgtagtcgaccttgcaccagtggcgcagataataattgaggccggacgcgagcgagacgccgttgttgccgcggatggagatccggccgtcgccggcgtctgagatttcgaacacgtccttgccgtcggccttgccgcgcagctggaagtcgaacttgtcgacccaccgctcgccgatcacgcggccgacgaggtttctgacctcggtgacggtcttctcggcggcatagtcggagtcggtctctacgcgggcccactcccggccccacgagcttgagtcgaagtcggtgacggagatggccttggggctggcctgctcgtcggagaccttggtgccgtggaaagcgacttcggcgaggttgacctgctgggcggcggagttgtagctgacgctgatgcgcgcgtatgcggcttcggtggcatcgatgggatgcgtgtcggcggcaccggtcgcgggggcgtcatcactcttgtaggccaccttgccgtagtcggcgccgtccttggacagatagacctcgtagtggtagtacgagccggcgaggttggtgatgtcgatctgcgagatgctgtatgtgccgtgcaggtcgaagtcgaggaagcggcggtagtcctgcatcgacgagtctgcgggtgactgccagtaggtcgccgaatcgccgtcgactgcggcggccgcagcatggccgtccgcggcggcaccgctcgccgtgacgccggcgatcgccggttccacggcgcgcgcgagacgtccggatgtgatcaggccgcacaggagtgtcgccatggcgacgagcagggccgtcgcgcgacgccgccatgatcgggggcaggtcggaggatgttcgggcgagtgcccacgacgatgacgagcggatgaaaccatcattggtcgcccttgccttctcttgattttcagtaagaaccgcaccggcgaacattgccggatcttgttaacaatatatacaaagaatgggacatggcgcgcccgcgtcacaccgcgccgcgccgctttcaaccgcccccgtaccacacaatgcgatttttggcggtttttgtgctggtgtggtacagcgccgattcaaggcaattcgggcgaattcctcagatcattggaaaatggcggttcctgaatttctgttcgttgccataccagctcaaaaacgcgtcgaaatcgcattgtgtggcaaacgctgtgccacacaatgcgattttgaccacaaattgacgtggtgtggcacaatccccagatgccggaccgcggatatgccggcaatagacaaaaagggttccaggcgatgcacccggaaccccgatatgcggacagggcgagattcgaactcgcggtggcttgcaccacaacggttttcaagaccgtctctttaggccgctcagacacctgtccttatgtgcgccatgaagcgcacaagattcaattatacatccggcgcggatgttctccgccaccggatacggtcgacgccgaagcgatcaggcttcccacttggtcggctcgatgacttccttgccgcccatgtaggggcgcatggcctgcggaatctcgatggagccatccttctgctgatggttctccaggatcgcgacgagccagcgcgtggtggccagcgtgccgttgagcgtggagaccgcgcgggtggaaccgtcctcgttgcgctcgcggatgttcaggcggcgggcctggtactcggtgcagttcgaggtggaggtgagctcgcggtagcggccctgggtcgggatccacgcctcggtgtcgaacttgcgggctgcggaggagccgagatcgccggcggcggtgtcgatgacgcggtacggcacctcgaccttggcgagcatctcctcctccatgctcagcaggtgctggtgctccttgtaggagtcctcctgcttggtgtagacgaacatctccaccttgtcgaactggtgcacgcggatgatgccggacgtatccttgcctgcggcgccggcctcgcggcggtagcaggagctccagccgcagtagcgcagcgggccgttggacaggtcgaggatctcgttctcgtgcatgccggcgagcgccacctcggaggtgccgaccaggtactgctcgtcaggctcgcgaagacggtagatctcgtcggcgtgggagttgaggaagccggtgccggccatgacctcgggacgcaccagcgtcggggtgatggcgagcacgaagccgtgcttctcggcctgatcgacggccatggtcagcatggcgatctgcatgcgggcgaccgcgccgcgcaggaagtagaagcgggagccgccgaccttgacgccgcggcgcatgtcgatgccggccacgccggtgccgagggtcaggtggtctttcggctcgaagccttcggccgcgaagtcgcggggctggccgaccttcttgacgacaacgtaatcgtcctcgccgccttccggggcctcgggttcgacgacgttcgacagcttccacatggcggtggtgtattccccggcggcggcgtccgcggcggccttgtactcggcgaccttggcggacagctccttggtctgcgcgatcagcgcggccttctcgtcggcgggcgcggcggcaaccttcttgccgatctccttctgctgggcgcgggcctcctcgaactccttgagcgcggagcgacgggtctcgtcggagcgcagcacctcgtcgaccagttcgacggattcgccgcgcttgcgctgggattccttgacaatgtcagcatgttcgcgaatgaattgaatatcaagcatgtgcctaacactaccgccgtaagccgacacggacaatacccctcgaccggcgcggccgttgcatcgccgcatccgactacggagccggagaacagagttccgagcggattcacacgacgttcattgcggctccatgtgccgtctcttcgggcttcctacgctggcgttgcacatcggttcccgtgcgacgaccgttcgcgccctgcgacgcgtcgcgcgggaatctttagcaagaaggagtattcatgcgtatttcaacacgcattcaaagcctgctggtctcggcagcgctgctggtgccgctggtggcgacgccagtcaccgcagcctacgcgcagccgaccgaggaaaagaccgcggcgtcctggtcgggcgtcgtcatcaacgaggcgtatctgtccggcggcagcaagggcgccgcatacaagaacaaattcatcgaactgtacaacaccaccgacaatgacgtgacgctcgacggcacctcgctgcagtaccgtccggcgagcggcacgggcgcgagcaacgccgccgccgacctgaccggcgtcatcaaggccaagggccactatctgatcaaggcgggctcgaacggctccgacggtgccgagctgccgcaagcggacgccaccgccaccaacctcaacgccagcggcaccaaaggcacgctgttcctcgccgccacgacaagcaagctcagcccggccgtcggcgacaccacggcgaacgccgacatcatcgacgcgctcggctacggcgacaccaacacgttcgagaaggcggctgccaccgcgccgaagagcaacgccgacgtgaagtcgctgaaccgcgcgaacggcgtggacacaaacgacaacagcgccgacttcacgctgagcgccgacatcacccccgaaggcaccggcgaaggatcccagccgacaccgaaaccagacccgacgcccggcgactgcccgaccggcgaggccgaaatcgcgcagatccagggcaccaccgacaccagcccgtgtgtcggcaagaccgtgaccaccacaggcgtggtgaccgcggcctacccggacggcggattcaacggctacaccatccagacgccggcaaccggaggcgcggtcaacctcgccgagcacaaggcgtccgacggcctgttcgtatacgattcgaagaacgtcaaggatcttcagatcggcgactatgtcaaggtcaacggcacgatcagcgaatactacggcctgaccgagctcaacgcgagctccgtcacgaagctctccgacaaggtcgaggccccgaaggcctccaccatggcgttcccgaagaccgacaccgagcgcgaaagcctggaaagcatgctgatcgcgccgcagggcgactacaccgtttcggacgtgtacaacacgaacaagtacggcgagatcggactcgcggcatcgaacaagccgttcctcaaccccaccgtcaagggcctcaagggcgacgccgaaaccggtgccgcataccaggccgaactcgaccgcatcgaagccgagggcgtgtacctggacgacggctccagccgcaacttcctcgacacgaagtacccggacaacgccgacacgccgctgccgtacctgtcgaacgaccagccggtgcgcgtgggcgagaaggtcacgttcaccaagcccgtcgtgctcgactaccgcaacagcgcgtggcgcttccagccgaccgaacgcctgaccggagacaacgccgacgcgcagccggtgacgttcaccagcacccgcaccgacacgcccgatctggccgcggtcggaggcgatatcaggctcgccacgttcaacgtgctcaactacttctccaccaccgccgacaagaccggctgctccacgagcaacgcctacaccgaccgcgacggcaacccggtcaccgcgaagaactgcgacgtgcgcggcgcatgggacaaggccaacatggaacgccagcgggcgaagatcgtcaaggccatcaacaacctcggcgccgacgtggtctcgctggaggagatcgagaactctgccaaggccgccagctccgtgccggcatcattcaagggcgagcgccgcgactacgcgctcgccacgctggtcgacgcgctcaacgagcaggccggcgaaggcacctgggcctacgtgcccagcccgcagaccgtccccgacctcgacgtggaggacgtgatccgcaccgcgttcatctacaagcccaccaaggtcgcgaccgtcggcgcaacccgaatcctcaccgactccgacgcgttcaacggcaagaacggctacgagcacggccgccagcccgacgcccaggcgttcaaggccaagggcgccgccgactccgacgcgttcctcgtcgtcgccaaccacttcaagtccaagggctcggcgagcaacgcgctcaaccaggatcccggcgacggctccggcaacgccgactacacccgtcaggcgcaagccgacgcgctgctcgcgttcaccgatgaggtgaagagcgatctcaagctggagaaggtcttcctcgtcggcgacttcaacgcctactacgccgaaaaaccgatccagaagatcgtggcggccggatacaccgacctgagcgagcaggtgagcgaaaagaccggcaagtacacctacgcctacaccgtcaaggacgaatccggcaacacgaacggaggggtcggctcgctcgaccacatcttcgccaacgaggccgcgatgcggtccgtgaccggcgcggacatctggaacatcaactccgtcgaatccgtggcgctggaatactcgcgctacaactacaatgcgaagaacctgtaccaggccgatcagttccgcgcctccgaccatgatccggtgatcatcggaatctcggcctccggcacgaccggcggcacggccacgctgaatctgctgaacttcaacgatttccatggccgcatcggcaagaacctgacggtgccgttcgccgctaccatcgagcagctgcgcgccgagcacccggattcgtcgctgctgctggcggccggcgacagcatcggcgcctcgctgttcaattcgtcggcgcagaaggaccagccgaccatcgacgtgctcaacgcgctggggctcaaggcctccgcggtcggcaaccacgagttcgaccaggggtacgacgacctgaccggccgcgtgatcggcaccgacggcaagcgcaacgcgcagtgggattatctcggcgcgaacgtgtacaagaagggcaccggtacgccggcgcttcaggaatacagcatccagaacgtcaatggcgtgcgggtcggtgtgatcggcgtggtcacgcaggagacctccacgctcgtctcccccggcggcatcaaaggcatcgagttcggcgacccggtcgaggccgtgaaccgcgtggcccgtcagctcaccgacggcgacgagtcgaacggcgaggccgacgtgatcgtggccgaataccacgagggcgccgcctccaacgaggatggcgccaccgccaagccgaccatcgacgagcagaaggccgccagcccggtgttcaagaagatcgtcgacgacaccgacccggcggtcgacgtgatcttcaccgcgcacacgcacatgaagtactcgtacaccgatccggcccacaacggacgcccggtcatccagaccggcagctacgccgcgaacatcggccaggtcgtgctcgactacgacaaggccaccggcaccgtcacctaccgcaagtccggcaacgtggcggtcgacaccagcaagagcgacgacgagctcgcggccgccggcgacgacaccgtcaggaacgtgaagagcatcgtcgacgccgccgtggccaagggccaggaggaaggcgacaagccagtcggctccatcgccgccgacatcaccaccgccttcaaggacggcgcgcgcgacgaccgtgcctccgaatccacgatgggtaacctcgtcgccgactcgctgctcgactcactgtcgtccgaggaccgcggcggcgccgaaatcggcgtggtgaaccccggcggcctgcgcgccgaattctgcaagaccggcgacaacgagaagtgcacgatcgccgccgacggcaccatcacctatgcccaggccaacgccgtgctgccgttcctcaacaacctgtggaccaccacactcaccggagcccagttcaaggaagccctcgaacagcagtggcagaccgacgccgacggcaacgtgccctcccgcccgtacctgcagctcggcctgtcgcacaacgtctcctacacctatgatccgaacgcggcgcagggcaatcacatcacttcggtgaccgtgaacggcaagccgctcgacctcaagcgcgagtaccgcatcggatccttctcgttcctgctgcagggcggcgacaacttccgcgccttcgccgccggcaaggacacgaaggacaccggtctggtcgaccgtgacgcatggatcgactacatctccaagaactcgccgctcaagccgcgctacgaccgtcgcgcggtggccgtcaccggcatcccggccgatggcaaggtcacggccggtacctcgttcgatctgcagttctcgaagctcacgctcacctcgctgggcgtgcccgccgagaccaagctggtcgccacgatcgacggcaccgaggtcggctccgcggccgtcaaggacggcgacaccgccacattgcaggtcgcggttcccgccgggctgccggctggcgcggcgacgctcaccgtcaaggccgtgaccaacggcacaaccgtgacgctgccgctgaccgtcgccaccggcacctcgaccgaacctcagcccggcaagcccggccagaccgagcagcctggtcagacgaagcccggtacgggcgatgaacggcacgacggcgcgaacaacgcagccggcaatggcggcaacgccggcgccgtcgagcagctgtcgcagaccggcgcacccgtggtggcggtggtcgtcgccatgatggcgctgctggccgccggtctcaccgcggtccgcacgtcgaagcgagccgatcgcatacgctgaccggccagctgaactggccacagtcctccgcgtggtgggacgcgccccaacgggtgcctcctgccacgcggtttttttatgcgcgcagcgagaccgggagtggtcgccaacacaccaagccaccgtcagactcgctacgcgagccagctcccaccagcaggagcaagacgacgcacctcccaatgacaacacaagaccgaggccggtcgccgtggcatccgcttcgttcctctccccacgcatgcccccgcccgtgaatatcgtgtgggaatcgtcgaatttcggcagggcgaaaccattacaagccacttgaacgttcacaatgggaggtatgccgctagccgccatcatcaccatagccgtcatcgccggcgtcatcgtcctcatcgtcgccgtgacgttcgccctgcgcgcccgccgccacaagcgcctgtcgcaacagctcgtcaaacgcgacgacgatcaggtgcattacgtcttcgtcgtgaacccgtccaagccgcaggccgcccagcggcgcgcgcacatcgaacagttctgccgtgacaagggactgaccgacgtggaattcatcgacacgcagctcgacaaggacggccgcgcatgcgccaaggaggcgctcgccaacggcgccgacgtggtggtcgcggtcggcggcgacggcactgtccgcacggtcgcgagcgctatgtccggcaccggccatgccatgggcatcatcccgatcggcaccggcaacctgttcgcccgcaacatgggtattccgatcgacgacatcgacgcggcgctcaccgtcgccacatcgcacgggtcgcggcacgtggacgtcggccgtctctcgctgctggacgatccgaaggccgatcacggccacgcattcctgatcatcgccggggtcggtttcgatgccgccatgatcgacgacaccgacccgcagctgaagaagaacatcagctggctggcgtatttcgtcggcggcgtgaagaacctgttcaccccgaaataccggggcgacgtgaccatcaccagcacggacggcagcatgcacacccgtcatggcgtggcattccgcacgttcatggccggcaactgcgggcagatccccgtgttctcgctgatgcccaacgcctcatacgacgatggcatcctcgatttcgagatcatcgacacatcgggcggcattttcggctgggcgaacctgttcggcgatgtagtgcaccagaccatcaccggcaagcccggatcgaacccactgtcgacgaattcgacgatggaccagattcagggagtgagcgcggagatcacgctggagaagccggtgctggcccaggtcgacggcgacatgctcggccgcacgcggcatctgagattcaccgtcgaccgcgaggcgctgtgcgtgcgcgtgccggaggtcgcgcccgacatgtcagcgacgggaatcatcccgccgattcgcgattgatacgaaaccgacgctctcagaacttgcagatagaggccatttttcatgagaaatggcctctatctgcaagttttgagagcgctactcatgcttacgtgcatccgcgacgacccgtgcgacgtgcaacgccaagtatgcgacctcatcttcggtgaggttggagcccagacgcagcgaggcgacggtgccgatggtctgcgcgcactgcatggccttgggatatgactgccggatcgacgcgatgatcggctcgggttccttgtcgagctgcttgccctgatggatgcgtacgaacaggtagcgcaaatgggtgatgaaccggccgacgttgacgctgtgctgatcaagcgagacgccgtaggtctgctcgatgatggtcagcatctgctggatgacgccggtcatcttgtatgtgtcggacaggtcgccgttcgcgaagccggcgttgaccagatgcaacgccaatgccacggtctcgctgccgggcaagacaccgttcaggtgacggttgagttcattgaccagccgcgaggcctgcgcgtactcggacgcgtacagcgactggacttccgcctgcagcggatatgcgatgttgacgtggcgctgcgccctctgcaccgcaccggtgatgtggtcggcgagcgccatgacaagcgtgggctgcgattcggcctgttccgcgagcccggtcgccgtcatggcgtccgtcaccagtcgaatgatctccggaggtatctcggacagcagttccgcgatatggtccgggtctcggccgtcggccggaacgaacacgcgcacgattttcgcgtcgtcgacgcgctggccgggtttggcctggaatcccaggccgcgcccggtgacgatgacctcgcgggcaccgtccttggcgagtacgacgttgttgttgaacacgcgaagaattttcacggcattccttccggccgctcggccgttgcgccgattggctcttgatgcggtcagcgctggatgtccagcacttcctggcccgcctgcacgtccacgcccgtcttcggggtgacgccggcaagcgccgcggtgttcagcaccgtcatcaatgtcgtggtgctgtatcccgcctccttgaccttatcaaagtcgacggtcaccagcgtgtcgcccgcgttcacgcgctggttggcgctgacggcaacgtggaagccctcgccgttcatcttcaccgtgtcgatgccgacgtgcaccagcacttcgatgccgtcgtcggtcttcaggccgaaggcgtgaccggtctcggccacggtctgcagcacgccggagaccggcgcgaccacggtggaatcagtgggctggatgcccacaccctcgccgagcgcgcgggaggcgaacaccgggtcgccggcgtcgtcgagcgacacgacatggcctgcgacgggggcgccgaccgtggtggtgcgaacggcggtggcagtagcggtcgcggtggcggtcgccaccggtgcagcgtccgccggcgccgtctcgacggcggtcccgtcagactcgctggcggcgttcatctcggccttctgctcgggagtacggtaatcgagcatgatgatcagcaccatcgagacgatgaacgacacggcgatggagacggcgtacacccacatctggctgaacaccgggatggtgagcagggaggtgaacgcgaacgcgttggtggtcacgccgcgcaccgattcgccggctgcagtgacggacgggaacagccagccgagcaccgcgatgacgacgccaccggcgaagcagccgaccagcatgcgcttgtagatcagcttgtagcgcaggtggatgccgtacaggctcggctcggacacgccaccgagcaggccggcggcgagggcgccgagcgaggtctggcgcatgtccttgttcttgtcgcggatggagatgaacagcacgccggcggtcgcgccgaagcaggcgaagttccacacgcccatcgggccctggatgaagtcgtagccaagggactggatgttcatcagcatcagggcgttgagcggccagtgcaggccgagcggcacaaggaacgggtagagcatcgggatcaggatcgcgaagatgaacggggcgtggccgttgagccaggccaagccgacgccgagccagttgccggcgaggatgccgagcgggccgatgaggaaggcggtgagggcgccgacgatgatcatcgagaagaacggcacgaacacgatctgcacgctgtcagggataatcttcttgagcccgtggtagacgagcgcgagcacggcagccatcagcagcggcacgaacacgttgccgctgtagtcgttgagcagcatcggaatgccaaacaccttggtcgagcaggaggtggtgcccagcgtggcgctcttgacgcaggtggtcacgcccttccacttttcggagtccatcaggtcggcgaactgcggggtcatcagagcggccataatggagccaccgagccacgggtcgaccttgagcttcttcgaggcgttgtaggcaatcatgatcggcaggaagtagaacacgcccttccagatggccttgatgaacaccaggctggtgttggcttcctcgcccggcacgataccgatggagatgcacaggttgatcagggcgatgatgatcgacgcgccgagcagcacgcccaggatcgggcggaacgagtcggacaggtactcgaagaacgagtccatccacgcgactttgccgcgcaccttggcgcgctcggcggctttgacgtcggcatcggactgcgccttgtcgccggcgaccgcgcccttgccagcgccgacgcccgccatctcgggcaggtgcatgatgttctcgtacattgtggcgaccgcgccgccgatgacgacctggtaacggtcgccggactgcggcaccgctcccagcacgcccttcatggtctccagccggtgctggtctactttgcccgcgtcgacgagttcgaaacgcaggcgagtcgcgcagtgcgtcaggctcttgacgttgcccgcgccaccgatcgcttcgatgatctgcgatgcagttgatgctgccatctcacatccctttccgtgaatcttccattgatccgtctccggtgccgggtcgcaaaacaaaaaaagacctgagatatggatagtcctatccgtatctcaggtcttgcgtcttgtcgacttgcaaccctgcattgagtcgattgatatgttaacttcagatgaactgcgacacgccgataaatcacaaagatggaatcgcaaccattcaggcgatgagcgggtggccgatgcggcccgcctttcatctatataaacatccatataagcatcatcgccggctcatgcgacgcatgtttcgcgggcacccgtcactgtgcgcgggtcgcgtcacgctgtgcgcccccgcaccgagtgacgctatgacgaaaacccttgcaatcactgggctttggggatatcgtcactgtgcgaggggtcgcgcagcgtgacgcgacccgcgcacagtgacgcaaaacccgcgcagcgtgacggccggtcggaacatagagcaccgaccggccgtatggtgtgggaccattttcggatctcgccgtgcgagacatcacccgcaattgacggggcgggcggcgcgctcgcggctcagcccgcacgcacgccgccttacggacgcatcacgtcgcccatccgcgaagacccgctaccgctacagcgtgaacttccgggaagcggcggcaccggtcgtggtgaaatcggagcccttggcctgcagcgaggccacggccgtcaccttgtgcgagccgggcgcaagcgccttcggcagacgaaccgtccaggcaccggcgttcccgacgatcgcgacgtagctcttgccatccaccgtcaccgtgatcttcgcgccggcggcggcatcgaccataccggatatctggccggcggcgagcttggcgaacttcggctgtccgacgttgatggacaggttgaagccgtgcttgaacatcgcctcggcgttgtacttgccgtcaacgatggcgaagccaccggcgaccgcatcgtcatcggccgcgtcatcgcaggagctcatgttgccgtacgaatccacgccgatcgagtagtggccggacacgatggcaccgcccgagtcgccgctcagcaggaaggcgctgaagtggaagccgtacacgtcgagcagctcgccgttgtcgttcacgctttcggtgaccttgtcggcggtgacgacgccgcatgtccaaccgctggtcgaaccggacttgcaggcgggcatgccgatggtgacgcagacgcgtcccagacctgcaacgggatgccgtcatcctgcgtgaaattacccacacccttggtggtcaggtctgggccggtggcgtctgcgccccacgtggacagctcggccgggttcttgtacttgctcgtggacaggtggtcgagcataccggcatcgttgttgtcgccgacgtggccgtatgtggtcgcgccgacggtgtcgcgcaaatcggagacgttctccttgcggttgggtacgtggtggatgccgggcactaccacgaacgcagccgatggcactgtcactttcgaccagctgccgttcgacgctgccggcacgtacgagtacacgctcgtgcaggtcgccggcaacgccgatggcgtcacgtatgacagcaccgagtacgcggcgaccatcaccgtgaccgcgacggccgacaacacgctgaccgccgccgtctcgtatgcgaaggatggcgagaccgttgacgcggccacgttcgccaacgtgtacaaggcgccgacgaagcctagcgagccgacgcagccggctgagcccgttagttaagcccggtaccaagccgaccaagcccagcaagccgaaggtcacgatcttcaagccgcaggttcaggtcgcgccttccgccgatgcggtgaagacgctcgcgaagaccggttccacgaccggtgccatcgtgattgccgccctcttcgcggcaaaggccaatccatcaacctctcgccggttccaagcgcctttgattccccatgccgttggcatatcggcgtcgatggccaacacagaccgcctctgccgtgccatttccactcgtcccttcctcccgcgtctccatcccctatgttccgcccttcgccatcctgtcctccggggctatccgtcgtactctgtcactccactaatcaatcctctagggtcaatcgtgcttcctcgcatccttttcgccgtgccccttttccgccatgtccctttcctccgtgtctcttttcgctgcattcttttccgccttccccctccccgccgtcatcctcttatctggtacaccggtacattacgggttcaaatagccgttattcacaattgcatgtgcgaaatggtcgtttttgggctttgaaacgaccatttcgcacggggaataccagataacggctatttgaacccgtaatgtaccggtgtacctaatgacagagcggatagagctgggcgcacatggcatgcgcaggcagcacgcccggcaacatcaccaacattctcgaacaaaaaatcacaatttctcacaaaaacgtaacccaaatgacaccggtcgtggcaaaatagaagcatggtagcaaacaatgcgggcaagcccgccaccccagctgatctgatcaatgtcgacgaagtcatcggcaagtactatgacctcgtccccgacccggcggttccggagcagcgtgtcatcttcggcacgtccggccaccgtggctcgtcactgaagacctcgttcaacgaggcccacatcgtcgccatcacacaggccatcgccgagtaccgcaagaaggccggcgtcaccggcccgctgtacctcggacgcgacacccacgccctgtccggtccggccgagaagaccgccatcgaggtgctcgtcgccaacggcgtgcacgtgcgcgtcgactcccgcggcgatttcgtccccacgccagtcgtctcccaggcgatcctgacgcacaaccgcgcggccgacggcacccagcgcttcgaaggcgagggcctggccgacggcatcgtggtcaccccgagccacaacccgcccaccgatggcggcttcaagtacgatccggtcaccggcggcccggcaccggccgagaccaccaacgccatcgccgcccgcgccaacgaactgctcggcgacttcaagtccatcaaacgagtgccctacgaggaggccatcaagtccgagtacgtcgagggcttcgacttccgcgagcactacgtcgccgacctgggcaacgtcatcgacttcgacgtgatccgcgactccggcgtgcgcctgggcatcgatccgcttggcggcgcctccgtgaactattggccgctcatcaacgagaagtacggcctgaacatcggcgtggtgcgccccgaggtcgacccgacctggcgcttcatgaccatcgaccacgacggcaagatccgcatggatccgagctccccgtacgcgatgaagggcctcgtggaccagctcaacgccggtgcctgggacaagtacgacctggtgggcggcaccgacccggacgccgaccgccacggcatcgtctgcccgaactggggcgtgatgaacccgaaccattacatcgccgtgtgcgtcgagtacctgttcggcggcaaccgtccgggctggccggaaggcaccggcatcggcaagaccctggtctcctcctccctgatcgaccgcgtggcctcgtccatcaacgcgaagctcgtcgaggttccggtcggcttcaagtggttcgtggatccgctgttcagcggcgaggtcgcgttcggcggcgaggagagctccggcatgagcttcctgcgccgcgacggccgcgtgtggaccaccgacaaggatggtctgatccccgacctgctggccgccgagatcaccgccaagaccggcaagaaccccgcgcagctgcatcaggatcaggtggcccgcttcggcgagagctggtacaagcgcgtcgacaccccgactacgctggagcagaaggccaagttcgccaagctcaccggcgatgacgtgaccgccacgcagctggccggcgaggacatcaccgccaagctgaccgaggcgccgggcaaccacgccaagatcggcggcctgaaggtcaccaccaaggataactggttcgcggcgcgtccttccggcaccgagaacatctacaaggtgtacgccgaatccttcgtctcccccgaggccctggacaaggtgctcgacgaggccaagctcgtcgtcgacaaggcattgggcgaatgagatccatgcaacgcatggccgggctggcggcccgttagccaccaaacgaccgaccccgaggccctttgcggatcagcttccgcgaagggccttcgcattacacccatgggccgtctggatgaacgccgtgaccgaacccacctcggatgtggataaccatgtggataagtccgattcacgcttcgctccacccaccgcatctgatatgatgacggtatcgtagccgcataggacaggactacggctccgacttcggcgcgcgtgcgtacagtggtgcgcccactcgcgtcgaccggtcccatcgtcgccaaggaaggggacgaaagacggatacacctcggtttgggcgcaccaccatccgcataagtaaggacatcaccatgaccagcaccagcagcaccgacgttccatccgcgatttccgcgaacgccctcatcatcggattcggcaagggaggcaagacattggccgcaaagctcgcttcaacgggccgaactgtcgtcgtggccgaagcgagcgccgacatgtacggcggcacctgcatcaatatcggatgcctgccgtccaaatcactgatcctctccgccgatcgggcgcggcgagagggcgcgaaccgtaccgccgaaacccgcgaagcggcattcgaagccgccatcagggagaagcggcgcgtcaccgcgatgttgcgcgacagaaactaccataagctggccgaccagggcaacatcaccgtgatcaccggccgcgcgcgcttcaccggcgcccacagtgcggaaatcaccaccgccgacggaccggtcgccgtggccgcggacatgatgttcatcaacaccggtgccacgccgcacattccggacattcccggcattcgcaccacgccgggcgtatacaccagcaccggtctgatggacgtcgacgagcttccgcaacggctggtgatcatcggcgccggattcatcggacttgagttcgcttcgatgttcgccgatttcggcacggcggtcaccgtgctgcagcacagcgacgagttcctgccacgcgaggacgaggatgtggcggccgcgatccgtgcacagctggaatcgcagggggtcaggttcctgttcggcgcggacaccaaggcgatcacatcggcggatgacggcatcaggctgtccgtctcgatgaggggcacgtcggacgtcggctccgaagcgcgtctgtgcctgtccaccgacgcggtgttggtggccaccggacgcacgccgaacgtcgagggcctgaatctcgaggcggcgggcgtggaactcaccgaacgcggcgccgtgaaggtcgacgacctgctgcgtaccaccgccgacggcatctgggctttgggcgacgtgaacggcggcccgcagcacacgtacatctcgctggacgactaccgcgtagtatggtctcagctgaacggttccgcgcgcccgtacacgctgagcgaccgtcgcaacgtgccgtcaagcacgttcctgcacacgccgtattcgcgtgtgggcctgaatgagcgcgaggcgaaggcggcgggactggattacgtggtcaagcgactgccggtggccacggtgcccaaggcccaggtgatgcgtcggccggagggcatgatgaaggcgctcgtcgagaacggcaccgaccgcattctcggcgcgatgctgctcgccgccgaatcgcacgaggtgatcaacatcgtcaagctggcgatggatatgggcgcgccggccagtacactgcgcgacatgatgttcacgcatccgaccatggccgaagcgctgaacgacctgttcgcgtaacggtcgcggatcgcgcgtgtccgcgatacatttacacagcgtccaacaaatcggggctcccctccttggattggaggggagccccttgggttatcggctagtcagcctgccgtcacacctcacggcggcgacgggcgtaggccacggcgcccaggccagcgcacgtggcgagcgcgatgatgatcgcgaacacctgcacgtcggcgccggtcttggagatgtcgtcacccttatgagtgccgctctgggttccgtcgcccttgttgtcaccgggtgcctgcgacttgagagtcaggcccttgatggcggcttcaagcgcgtcggccatcgcgtcgaccttgctctgctggtcgatggtcagtccgcgcttcacggccttcttggccgcctcgaacttcgccaccgagtcggcggtgtagccgctcaggtccgaggggaccttggcgagcaggtcatcgatcttgccgtagtcagcggacttgtaggcaagcttggcctcggcggcttcgaacgcctccttggcttcggtgaactcggcaatcccgacttcgccttcaccggcggcggccagcttcttcagcgccttgtaggcgtcggagtaggccttgtagctggcgtcggtgtaatagcccttgtcgttgtccttgagcttgatgccgtccacgtagtccttgacgccggtggcgcgggcatccagcttggcgaccgcagcgtcgatggcggcgacgcgctcggcgagctccttgacggtgccggacttgtacagcgtgtcgagacccttgacgaccgggtcggaggtggtgtcgtccttcgcggcgagcagcttggagagcgcctcgtagctggccgtggtgtacttggacgagtcgaccttgccggcttcggcgaccttcgccttgagttcgacggtggagaccagggcctccttcgccgccttcatggcgtcgatgttctgctggttgaggccggcatcccccttgaccttgtcgctcttcgccttggcgatggcgtcggtcagggccttgtagctgtcggtggtgtactcgctgccgttaaccttttccatgtcgacgatggtctcgtcgagcacggtggtgtcgggcggcgtcgtggtgcgcaccagcgcgttctcggcggcggtcagcgcggtcagcgcggcggccaccgaatcggtggtgccgttgaccagcttcgcctttgctgccttgagcgcgtcggagtacgccttccacgagtcggcggtgtagttcgcctccacgtagttgctctcgtgcgcgatctgggccttgagggcggcgacgttcaccagcgcggtcttggcggtggtgtagtcggcggtcttggtcttgaacgcggccggcttggttccgtcagcggcgatcagggcgtcgagcgcctccttagcggccttgaaagccgcgtaggagttcgtggtgtagtcggcctcgtcgatcgtggcgaagctgtcgacggcgatcgtcgcgagctcacgctggtaggtggagtccttcagcgcggcgagagcgtcatcgacggccttcttgaggcttgcggcgtctgctgtggacaggttgttcgtgtccttcagcgcttccttgacctcgtcgagcgcgtcggtgtacgcggtgaacgtcactgtcgtgtagaagtggccgtcgttggtgacggcttcgtccacgagcttgcgcagcgcggcgaccgcggcggcgtcagccttggtctgcgcggcgtcgatggcgctttgcacggcgctggctgcggcgtcgatcgaagccttgccgaccagcgggctgccgtacacagcctgggcggtggccttggcctcgtcatacgcggtcttggcgttcgcggtccaggcggaagtgtcgacggtcgcgtcgatcttcgccttgagcgccgccttggccgtggtgatgtcggcgtcggtgtcggccgagtcgagcgtgatgaactcggagatctcggggatggcgtcgccccacgcgatcttgacgctgagcagctgcttgccgtccggcatcttgaactcgttgatcgcctgttccagcgttccgaacgtcacctcggaggtggagcgggcggctgcacgagccgtcacaccggcagtggttccggtcgccgcgtcgtacaccgtaccggtgacggtcgcaccgctggcggcccccgactgcacgatacggaacgacttgatgtcgctcgggtcatcgatcttgtaggtcagggagccattggccgcactcggcttgtacgtggtggtcaggtcgccgtcgatcatgttgctcggcgcgtggccgcgctcctcgaccttggtggcggagaacgccgcgttcgcctcggtggagacgtaggcgccctgattcaccatgaactcgttgaacgcgagtgcacgctgcgggtagtcggcggtggtcagcagacgcaggtagcgcatgccggtgccgttggcgatgtcgtccttgccgtagtagaagacgttcgggtagttggaatcggtcttcttgttcgtgtcgcttatgtcgccgaacgcggtcgtggtgtcggtgtcggacacgccgtcgccaatctcgaacgcgtcaacccaggtcttgccatcgacggacatctgcaccttggtgtcgcggatgtagtcgtactgcgtgtcctgcgtgtagatgcgcagcgaggtgatgtcgatcggctgaccgagatcgaacaccgcggtgttgccctgtcgcggctggccggcgaacttgatgaccgtggtcatatcgccgtcgaacgcgttgccgctttcgcgggtgtcggttccccaatcgttgcgcttctggatgtcggatgagaccagcttgccgaacttgccgaccgtggaaaagccgaccttgagcttgtcgaccgagaaggccactccgtcggtgccattgatcacgcgcacgtagcgggcggtcttgcccgtgaggttgcccggctcgacagtggtccagacgagtccgttgtcggagatctgcaggctggggttcgcgttgccggtgttcagctcgacgtcggtcagatcacggatcgccagcagatcgagtccggcgtactggccgccgtcaagcatcgtgtgcgatttgtcgaacagctccgccgtattggcgcccagcgtggcggtgtacccgtgctgcgtcttgttcgtgtacaccgacttgagcggatcggcggtctcgggcggggtcacggtgatctcggccacgcgccaccacacgttcttggcggcggtgttgcggatgcgtacgtagcgcccggtcacgttgccgctcaccgtggaggtgacgtcgtcgctcaggtcgccgagcttggtccaggtggccttgtcatcgctgacctcgacgacgccctggctcggacggtcgtcggggctggaggcatgaccggtaatcgtgacctcgccgatcggcttgctggagcccagatcgacgatcacggccgcgccggccgcgatcttgtcgccgttcgggtccttgaggtaggtgatcgtggacgggttgccgtcgatcatctgctccttggtgctgctgtaggtggcgttgaggttctccagctgcacgccggtcgccgtgtacggagcgagagtctccttctcgaccttgttgacgtcgatgcccttgatgccgagccacaggtcatcgccgttgtcggcggtggcgatcagtcgcacgccggtgacgccggtgatgttcagaccggtgactttgatcggctcctcggagcccttcgggcgctcgaacgtcgcatccggcacgtcggtccagttctcgccatccgtggtggtctgcagcttggagtggtagaagtggttcttgccgccgttgaacgcgaagcggatgctcttgagcgtggtggccttgctgaacttcacgccgacgtagttgcccttgtgcaggtagttcgggttctggaacaccgtgaccgtgctgtccttgccatcgaagatgtcttcgatcgagccggaggtcggcgtggtgaacacgtcgctgatgtacgtcttggtcacgacgttcgggtcggcctcctgctgcaccttgttggacaggtaggagtccatcgccttgatgaacggcacgatgtgctgcacgccgacctcggcgtactcggtgtggttcacgtagtagaagccgtgcttcttggacgcggcgaacgcggactgcgcgtcggagtactccttgagcgtcgaggacgtgtcgccgttcagcgcggcctcgatgcccgcgatgtaggcgagcgcggccttggtggtgtcatcccagcagtcgatccacggggcgatctgctcgttggcgtcctgcccggtgtagtccttgccgatgtcgccgagcatcttcgcatcgcccttggcgcggtaggtcttggctgccttctgcagcgtgacgaacgcggccttgatgtcggtcagatcgtgggcggtgatggtgccgtcagccagcttcgccttggcggcggtcagtgcgggagccaggtccacggactcctgcagcgcggtgacgcgcgaatccatgttctggttgatggtgtgcttggacagctcacgcagcgcgttcgacgcggcggtcggcacggcggagttgtggtcgacgaacgagaacgaatcctgccatgcctggtcggcctcgctcttgctccgccagatgttccacgagtaggtggcgttgccgaagatgccgaccttgctcggctcggactgctgcatcgggttgagcacgatgccctggatcttcgacgggtcgacgcccggatgcaggaacgtgtcgtagccgcccatgatcaggtggctcttcgagttgtcggagcacggccagttgatccacatgtaggggccgcggccgacgttcgaggtgaacgtgtcggtgaagttctgtgagacctcgccccagacgcgtccgccggtcatgacgatctgcacttccttggggaagttggcgaagtagctcatgccgttgcccatgtattcctgcgtgacgaacggcagcgtggtcttgaggtccgggtaggtcttcttcatttccttgagccacgcgaccatatcggtgagcagcttggtgtaattgttaccgcccacgttcgccgcgtcatcggccaggatggcgatctggcgcacgccgaccccgatggtctgcgcgaacttgtcctgcagcaccttcagatcggcctgatagttcgcctcggagttgaaccgaatcgcgttgttcatgaacgggtgcagagcgaacacgaaacgcgtcttggaggcgttgccggcatcggcgagcggcttgatcttggtgtcgagctcgtcctgcgtgtacagcgtacgccactgcgagttgtgcttcggatcgtccttgggggcgtagaagtacgagttgagcttgtagtagccgccccacttcatcaggttgatgcggtcctgagtgctccacgggttgccgtagtagccttcgatgaaaccgcggctgaccacgtcggcgtagtcggtgacggtgaagttgcggatcgtcaggctatcgatctggccgagcacctggtacagggtggtcaggccgtagaagctggcgtcggtgtctttgccgagcacggagatcgtgccgttgtcggacttgaggaagtatgagtcggtcttgtcgaagatggcggaatccgggctgtacttgctttcgatggcagtctcggccttgccatcggaaccgttcacgcccacatagacgttggtcttgccgctgactgcggcgtcggattcggtgacgttcaggttcttgagcgccgccacttcgtccagtcggtcctgggtggcttcatcgatgtcatcgtcatagatgacgttgatgtcgcgaagaatgtactgtccgctgtcataacggatcgaatgcggcttggggtacagcgtgtattcggtcgccgccgtatcgccgcctgccgcgtacgccgtctgcacgccgatggccactgccgggctcaacgacagagccgcggcaagcaggcctcctaatgccttactgcgcatactggggttcctttccttgtccggcactggggacgcgccggctgaatctctcatcattgaattattcgtcaccatgctgctttgcatcatcgtgacacggggactcgtgtgagttcatcattggtcagtattcagtatatataattaacaaaatatcgcgacgttttcggtcgtgtcgcagcccatcggcgattcatggccgtgacacggcgtgcgttactgttgttgtcatgaccatcaccgtatcgacagacggaagcgccctgggcaatccgaacggcccaatgggctgggcctgggccgaccacgaactcaacatggcacattccggcggccatgagcacggcggcgactgcgatgccggcggcgccacgaacggcacgaatcagatcggcgaattgtgcgcagtgctggaggcgctgcgcgcacatcccggcgcggagccgctggtcatcgagaccgactcgcagtacgccatcaactgttccaccaagtgggtgcacgggtggaagaagaacggctggaagaactcgcagaagaagcctgtgaagaacgcggcgctcatcagggcgatcgacgccgagctgtcgcgccgcgccggctcggtgaagttcgtgtgggtcaaagggcacgcgggcaacgccggcaacgagaaggtggacgacctggctcgcacgtatgccggcgactgccgcagcggcgtgcaggagggatatctgccgaaggagggatggcagtcgctgctggcttcggagtatgccaagggaaccgacgtgccggaggatgcgcagatgctgctggacggcaagatttccacgcaggagtaccatctcgggcgaggcggggaatcgggtgaagcgggagccgagcacgaatcggacggcgacaacgtcgcaaagcgaatccgcaagccatcgttggcggagctgcttgccgaacccgaaggcgtgcccgactacggcgagacccagtcggacacatcatccaccactgcgatgtcaactcctactgttcctatgacgaccgaatcggacgcgaccgtcgcactgtcatcgaattcggcacaggccgaaggcacacagtccggcagcttcacacgctctgtggccgaacctgcggcgccgcggctctcaccgaccgccctcaccgcgtcgggcacgctgcgctttactcccccgccatccaccagcccgacatatgacggacggccgcgcatcatccacggactggttcgcgtggacggatatgtgaacggcgacggcaccatcaccctcgacaatgccgcgttctatacggacaagcagggatagcagccgaatggcggcggttctcctcccaaaacccggacgaacggcgatgacgttccatgaaccggatactatagaggtggacttcaatcccaaagtttgaagcatgtttccctccaaggggaatgcacggacatttcaaggagtacatgatggacaaggcacagcaggatgcactgaagaaggcggccggcatcgaagccgccaagctgatcgagaacggcatgatcgccggtctcggaaccggttcgaccgtgcgtttcctggtcgatgagctcggccgccgcgtcaaggaggagggcctgcagttcaccggcgtgacgacctcccgtcgcacgcaggagcaggccgaaggttacggcatcaagatcgtggacatcgatgatgtggatcatatcgacatcaccatcgacggcgccgacgaggtggacaagaacttcaacggcatcaagggcggcggcgccgcactgctgtgggagaagatcgtggccacgaactccaacaaaatcgtgtggatcgtggacgagtccaaggtcgtcgacaccatcggcaagttcccgctgccggtcgaggtgattccgttcggcgccggccacgtcatcaagcagttcgaggccaagaactacaagccggtgctgcgcctcgacgccgacggcaaggaagtgcgcaccgacgagaacaacttcgtcgtggacctgcatcttgagcgcatcgaccacccgcaggatctcgccgaggacctgatcaacacggtcggcgtcgtcgagcacggcctgttcctcaacatggtcgacaaggtcatcgtcggcgaccccaacgggccacgcgtaatgaccaacggcaacaagtgacctaacgcggcgaatcgccgcctcaatcccggcgccggcagccccccccccatcggagtctgccggcgctgtcatatccagttcgcttccgccagcggggacgaggatgtaaaagccccgcggccgacagggtcgcggggctttgtgtgcgcgcttgcgagcgaacgactacttgcgctggtggcgagtcttacgcagcatcttgcggtgcttcttcttgctcatccgcttgcggcgcttcttgatgaccgaacccatcgtcagcctcccttagtacgttaaagattgcaacttgcccaataatacacgtattgagggacttacgcatccgcgcgttccatttccgccatgaatccgcaaatcaccccgaattatcacgaaatcacagcgggaacggctcgtagaaccgcagcacggattccttggagccagtcacctcgaacacggcggtatcgttctgccacaacgccgtcgcggtcttgccatccttactgtcggccctcaccgtgtagctgccggtgctcttgcccgacaccttgacgtccccggacttcagctccttgccggtcaggttcttcgccagctcgtcgtactgcttcttcacggtgtcggagtccgaccattgcgcgacgatgacggtcacgtccttcgccgacttgcccgtggagtacgtgagcgtgtactcctccagcggcgacgcggacttccaggtctcgctggcgcccgccttggtgcgcgcgtagttgagcacgctgtccggcatcgccttgagcagttcggatgcgtcatccggcagcgcggtggccttgatgctcggcttggtaggctcggtggcggtctgctgctgcaccttcgtcacttcgtccgtcttgttcaatgcccaaccgggccatacgaacgcggacagcagcgcaagcacgacgaccagcgcggcgacgatcatcacgacgatcagcttgccgcgcgatgcggaactaccgtgcggataggaaggggattgagtctttgccatgctgtgattctctcacgcgcatacgacgcaacggcatcgtttcgtcggcgacgtcgacgtgccgctttgtgctaaggtctgcggtatggtgaagtcggcgacgcgatatgtatgcagcgaatgcggctgggatggtctcaaatgggtgggccgctgcccgcagtgcgggcagtggggcaccgtggaggaattccacgaggcccgtcccgccgcatcgtcgtcgcgcaccgcggcgccgggccgcacctcacgcacgcaggcggccgtgtccatcgtcagcgcggcgacgcccatcacccagatagacacgtccacggcgtcacggctgtccacgggtttcggcgagttcgaccgtgtgctcggcggcggcatcgtgcccggctcggtcgtgctgatcgcgggcgaacccggcatcggcaagtcgacactgctgctggagactgccggcaacatcgccgcaggccagcccaacggctcggtgctgtacgtctccggcgaggaatcgcaggcgcaggtgcgtctgcgggcgtcgcgggtcaatgcgatggagcagaacctgctgctggcgtccaccaccgatctcgccaccgtgctggggctgatcgagaggacgcggccgacactggcgatcgtggattcggcgcagaccatcgtctcgcaagacgttgatggcatctccggcggctccacgcaggtgcgcgaggtggcgagcgcgctgatcgacacggcgaagacgctgaacatccccgtgctcctggtcgggcatgtcaccaaggacgggtccatcgccggcccgcgcacgttggagcatctggtggatgtggtatgccagttcgagggcgatccggaaacggcgctgcgtatgctgcgggcggtgaagaaccggttcgggcctacggatgaggtcgggtgtttcgatatgagtggcgagggcatcgaggaggtcagcgatccctcgggactgttcctgtcgtccgccgacgaacgtgtggagggcacgtgcgtgacgttcacgctggacggccatcgcagcctgcccattgagattcaggcgctggtgaccagttccgtgctgccgacaccgcggcgggcggtggtgggggtcgagacgaaccgcatcgctatgctcaccgccgtgctgtaccgacatggcaaggtgaacctgctggcgaacgacctgtatgtatcgacgatcgcgggaggactggcgaaggaaccagcctgtgatctggcgattgtggcggcgctggccagtgcggccaggtcgaagccaatcgcgcgagacacgtgcgccatcggcgagatctccctgaccgggcagattaggccggtgccgcggctggagcaccggctgcgcgaggccgcgcggctcgggttcgccacggcggtggtgccaccgatgcgcaagcgtgtcaccatcgaggggctgcgcatcgtagaggtgacgcatctgcgcgacgcgctggagtctctgggcgtcgtctgacagtgacggtgacggtggcgacacggcacgcgcaagatacgcgaggcacgatagcggcgcgattcagcgcatgcgagcctatgccgataccgttcggacgcaggtggagagaccggcgtctgtcgggcgctcctgccgcgctcaacgcgcggaggtcagttccctggtctcctggacattgcgcgtcaattcgtccttgagcgcatcggcactgtcgaatttcacctgcgggcgcaggaatcccgcgaattcgacgcgcacatcgtgaccatacaggtccagccattcgtcggtgaccgcgtacgcctcgaccacccgctcattgagaccggtctcttcgttgaaggtcggcttcgtgccgatggagatcgctgccggccaccggtagggtgattcggcggcgagcctggccttggatgagccagaatcatacacgcgcggaatcaccgaggcattgccgctgccgctgttgtcgtcggaggcgttctcgtcggagccggcggtcgctcccgccgcgcccaaatcgatcagccagccggcatacacgccatccaccggaatataaccgtcaatcatgctccccaggttcgccgtcgggaaaccgattgtgcggccgcgctcctcgccgtgcaccaccgttccctcgatggcgtgcgcatggccgaggatctcgtcggcggccttgatacgaccatgtgcgagcaggtatcgcacgttcgtcgagctccacacgcgcacttcgcgcccctgatgcttcttgctccacgcgcgcagctgcgccttggtcatgccttcggtcggatccacaggctccccaggctcgctcggcatctgcggggtgacgtcggccggcacacgcacatgacctgggccgcggtcgtcgacgatctcaagctcgaacacgccggtggcctgcgcgaggactccgatggccttcacatcgccagcgcggttggcgcccatcgccgcatccgttcccagcaccagcgtgcgcatgcccagtttgccgaccatctggccgaggaagaaccgatatgatttcgtggcgaacgccagcgtatagcgcacgatcagcacatggtccacgccaaggttctccagcgtccgcagccgctggtcgacgctggtcagcgccatggagtcgcggaagccgtcgcccggttcctgcccgtcatgggcggccgcgtacgcgtgcacgacaccgggacgcgggtcgaacatcaccaccacggaaaacgccttgtcggccttggcgagttccaccgctcggcggatgaccgcctgatggccgcggtgcatgccgtcgaacacgccgaccgtgaccacggatttcctgttggcactcagcgtcggccattcgaccagcccggaggcgtccggggcaagaatcgtgattttcatgggtgatggtgttccttcacgtgttgcgccgtatatgcggcttgtgggcatggttccggccttccatgatacccgccaccaatgcggctgcgccaccgaatgatgaactgatttgcatcatgccgtcccgatgccgtcactgtgtgcgggcgccgtcactgtgtgcgtggacgcacagcgtgacgcataccccaaaacccttggaaaataaggatttctggcattgcgtcactgtgtgcgtggacgcacagcgtgacgcgcctcgcacacagtgacgcattacgcgccaaatacggtggccggcttggcctcgccacgcttggcgcgctcgacgagcgccaccacttccccgctctgcggcagatacgcggcggccgtaccgtggatgtcataggggatacgccggccgtaccgcaggttgacggcgtcctgatcggtgatggcgagcagcggcatggtgcctcgcgcggcatccagcatcgtcagcgccttgcctgcgagctcgtcgccaatcacatcgagcacggcgcggttgcgggactggtggttgccgttgcggtcggtgtactcgcgtgtctccacgtgcgcggtgatgacattcggcgaggagacgtcgaaaccgcccacccgcgtgcgccgcagccgtatcaggtgcccgccgactcccagcgccgcgcccaggtcgcgcccgagcgcgcggatatatgtgcccgccgagcagctgacgcgcacatcgacgtcgatcaccggcgtcgcctccgcgtcatcccgttccgtcgttgcccgcccgtccgccgccgagacgagcggaagtcctagctgccgcgtcggggcatagccgaaccgcacatccagcacaccgaacgcgctgacggtgatccgacgcgccttgagctgcacgtccttgccgtcgcgggccagatcataggcacgttgaccgttgattttgattgcggagaacgtgttcggcacctgctcgatgctgccggtgagctgcaatgcgatgatgtcatcgatacggtcgcgccacagctgctggccatccggcaaaaacgcttcctgatgcggatgatacgcggagccgtcatccgcgacctttgcggctgccacggccgaacccttggccgcgttcacaggcccattctcgccagccgactgaggcccaccggcgaccggcaatgccagcagctcttgccagcgctcgggcgaggtagccgacagcagttcgccatcggcatcatcggtggtggtggactggccgaggcgaatcgtcgcctcataggtcttgtcgtgttcgacgatatggttcagcaaccgcgtggcgttgccgaatccgacgaccagcacgccggtggccatcgggtcgagggtgccggcgtgccccacctttttcatatgcaatgcgccgcgcgcagccgcgacgatgtcatgactggtgacgccacgcggcttgtccacgaccaacaatcccgacgtaggagtcgccggcgcggcggagccagccacaggcgcggcttgcgcagccacgatcggagcctgctcgccgcccgaggcttcgggtacggtccccatcagtgaattctctcccgtctcgcagaaccgctgatatgaggctcagcggtcgcccgttgcctcgtccgccgcgttctcggcgtcatcttccagggtctcgacgccgatgccgttgccttcgacgtcgtcatcgtcgaggtcgtccgcgtactcgtcgtactcgtcgtcatcgtcaaactcgtcgtcatcgcgctcttcaggatgcttgtacgggtcggcgtcgcccgcgtactgcgcggtctcgcgcgccttggcgatctcctcgtcacgcttgtgcgcgacagccaggatatcctcgatctcatgcgcctcgctcggcacctcgtcatagatgaactgcagctgcggggtcagtcgcaggccggctttggagccgaccagcgaacgcagccgccctttcgcctgatcgagcgcctgcttggcgcgcttgcgctccccctgctcgcgcccatcatgcccaagctgagtccagtacaccttggcgatctgcaagtcattggtgacgcgcacatcggtgatggtcacgctcgcaagccgcttgtcgtgcagctgagcttccatcgacgacgcgatcacccgttggatcagcgccgcgactcgtgcggcgcgcgggttcgttcctgccataaaaatccttttcctcgattgcgcggcgaaccgctgacaatatcactcgtatcatattcgcacatcccctactcgaaggctcacagcgaatcgttctcaataagaaacatgcggggattgcgcacattagcgcacaatcgaacaaaaccgaaaagcccggagttccggccatcagcagcgaatactgttcattggcgaaaaacgggggggcgcacgaaccgtaatgagaatggttcgctgcgcccgtccgcgaaaaagcggcggacacccgaaagcgcccgccgcccatgtatatatgcgccttacttgcgctcgacttcctgcatctcgaaggtctcgataatgtcgccgagctcgatgtcgttgaaagtgccgaggttgataccggcctcgtaaccttccttgaccgactgcacgtcgtccttgaaacgacgcagcgaggagatctccaggtcgttgaccgtggcgacgccgttgcgcaggatacggcacttcgtaccgcgcttgacctcgccgtcctgcaccatgacgccggcgatgttgccgaacttggaggagcggaagatctcgcggatctcggagtgggaggtgacgacctcctcgtattccggcttgagcatgcccttgagggcggcctcgatgtcttcgatcgccttgtagatgatcgagtagtacttgatctcgacgccttcacggtcggccagatccgccacctgacggttcgggcgcacgttgaagccgatgatgacggccttgtcgacggtcgcgaggttgacgtcgttctgggtgatcgcgccgacgccgcggtggatgacctggatgccgacctcgtcggacacctcgatcttcatcagggagtcttccagcgcctcgacggaaccggaggagtcgcccttgatgacgatgttgagcatgtccacctcggacttggcgaactgctccttgaggctttcgagcgagacgatcttgcggcgcttcgcgagctgcgcggcgcgttcggtggcctggcgcttctcggcgatctggcgggcggtgcggtcgtcggatgcgaccaggaagagatcgccggcggtcggcacggacgtcagacccagcacctgcacgggcgtggacggggtggcttccttcatgtggttgccgttctcgtcgagcatggcgcgcacgcgaccgtacgaggtgccggcgacgatggcgtcgccgatgcgcagggtgccctgctgcacgagcacggtcgccacagcgccgcggcccttgtcgagtcgggcttcgacggtggcgcctcgggcgtccatatccgggttcgcacgcaggtcgaggtcggcgtcggccgtgagcagcacggcttcgagcagcttgtcgacattggtgccctgcttggcggaaatgtcgacgaacatggtgtcgccgccgtactcctccggcacgaggccgaactcggtgagctggccacggaccttctccgggttcgcgcccggcttatcgatcttgttgacggccacgacgatcggcaccttggccgcctgcgcgtggttgatggcctcgacggtctgcggcatcacgccgtcatcggcggcgaccacgagaatcgcgacgtcggtgagctcggcaccgcgggcacgcatggcggtgaatgcctcgtggccaggggtgtcgaggaacgtgatcttgcgcttctcgccttccagatcgacggtcacctgataggcgccgatgcgctgggtgatgccgccggcctcgcgggcgatgacgttggtcttgcggatggtgtcgagcagtcgggtcttaccgtgatcgacatggcccatgacggtgacgaccggcggacgcggcttcagatcctcgtcctcctgcagctcctcgctgtcaaggtcgatgtcgaactgctgcagcagctccttgtcctcctcctcggcggagacgatctggatgttccagccgatctcctcgcccaggatctggaaggtggattcgtccaacgactgggtggccgtggccatctcgccgagatggaacagcacggtgaccaaggccgccgggttgacgttgatcttctccgccagatcggcgagcgaggcgccctgacgcaggcgaacggtctggccgttgccggtggggatgcgcacgccgccgatgacgggtgccttcatctcctggaattcctgacgcttcgcgagacggttcttgcgggccttggacgacttgccgccctgacggccgaatgcgccggccgcgccgccgcgaccgcgaccgccgccgcgcgacggaccggttccggacgtgttggagttgttctggaagccgccgccctgaccagcgccggtgccagcgccggcaccgaagcggttgccgcccgcaggacgggcgccgccggtctgacccggacggttatgcccccactgccccggcttggcgccctgcgctccctgaccgggacgaccgccacggaatcctccgcgaccgccctgacctgcgccggggcgaccgccacggccgccgcgattgtcgttgtggttgccgtttacggtcggacgggccatcgggtgcggacgggggatgtcgcgcggggtgggcgcgtgcatgccctgcttgcggctgaacgggttgttgccgggacgaggccccggagtcgacggacgggcgccgccgttggcggaaggcgcgctgcctgcgcccggctgctggccctggcgcggctgaccctgatgggagcctcctcgggaatcctgcggacggccgccggcgttgccgccgtgaccgggttggtgggaacgcgggccggggaaggcgccgcgctgccctgaaggcgcgtgcggattgtgacgctgcgcgggtgagggacggttctcgccgccttcacggttcggtcgagcgtcacgcatgtcgccgcgggattcgttgcgattgtcgcgcggcgtcgtgccgcgattcgatgacggcacatgtgcagcaggcgccgcagagcgcggttccgccggacgcggtgccgcggcgggcttcttgcccagaccgggcttggctacaggtgcgggcttgactgcgggagcacgatgctccgacggtgcgggagccggtgtcttgcgttccgctgcggacgctcccggcttcgcctcgcccttctggaaggcgttcttcaacttgcgcgccaccggcgcctcaaccgtcgaagaagctgattttacgaattcacccatgtccttgagtttgtcaaggacggttttgctgtcgacgccaaaatccttggcaagctcgtacacgcgttttttcgccacattactcctaattctgggccgcgcgtagactcgcgcggctattttccgatgacggattctgcccgtttcatcgtgcaaccatggtcgtgttacctcatatctcgatcccgtggcatgacggcataacgcatccacacccggtgtgccgtgtccagcatactagggacgttggatgtgccgtcggccgcgcgtcaccgccgtgtcgcggatcacttgccttcggcagcgaccttcttcgcgtgcgcttcggtggattcgatgccgatcttccatccggtcagcttcgccgcgagacgcgcgttctggccttccttgccgatggccagcgacagctggtcgtcatggatgaaggcgatggcggtcttgttcttctcgctgatgacctgcacgccggtggcgacggcgggagacagcgcagaggcgacgaacttcgccggatcggcggaccagtcgacgatgtcgatcttctccggtccgaggttctccatgacggcgcgcacacgagcgccgccggggccgatcagggcacccttggggttgacgccatcggtgttggcgcggacggcgatcttggtgcgggcgccggcctcgcgggcgatggccatgatcgacacggcgccggacaccagttccgggacctcgcgctcgaacaggcgacgcaccagctcggggtgcgaacgggagacgacgatctcggggcccttgacgccgcgcgccacgttgacgacatacacgcgcagacgctcgccatgacggtaacgctcaccgggcacctgctcgcgacggggcagaatcgcctcgacatcgccgatggcgacatgcacgttcgtcggatcgctggcatcctgctgaacgatgccggtgacgagcttgcccttctggccggagaaggcgccgaagaccttgtcgtcctcggccttacggaacagctgtccgatgacctggcgcgcggtggccgcggcgaggcgcccgaagttgcgcggggtgtcgtcgtactcctcgcccagctccggtgcgggatgagggtcatcctcggtgggctccaccgggatctccttacgagcccacacggtgaacgtgcctgcccgcgtgtcgagttcgacacgggcatgcttggccgcatgaggtgttttcagataggccagacgcagcgcctcttccagtgcggcgtccagttgttcgagatcgattccttgctcgatggcgagctgatgcattcctgccaggtccagttccatactcaagacctcctatgaagttatagccgtggtggcgcgcatatggtcacagtcgtctattagtgtagaggcctatgcagacacgtcattggccagatcacggcattccatgccgtgagaggaacatatcttcgtggtgtcgccgtatcgtcgcggcactctgcatcaccgccctgtgcggcgccctgagcgcctgcagcgcgccccggatcgatgggcgcgcggagtcggaacaccagcccagcgcctgcgagagcgcctactgggccgccgacgcgtcgacggccaccatgaacggccgtcaccatatcatcatgcgatatctcgcggcgaagcaggccgtcgggcagtggagcgaggtggccgccacctgcacccagcgattcgcgcagggcacgatcagaagcgcccaggccgagcatgtggccgtgacgctgggcacaaggatcggtggcaacgacacctaccgcacggtctccgacgacagcctgaggcaggttctgggcatcgacctcgacggcgccaccttgggcgccatgtcgctggccgaggaccgcgccgggttcgtcatggaggtgctcgccgcgcgggatacgcccggcgccaccctgagccggtccgaccggcacaagaccgcggggcaattgctcttcaccgcgtccggcttgagccgcgacccgcgagaaaaggtctacgacatccagaagatcctcgcctcgccgacctcgatgaccgattccacgaccggcctgagcgtgccgacaacggccttgacggagatcgactgcgcccgggagcagctcgccgcaatggccaatgacggggcgtcggccaagtcgaagcacaccgacaagaccggcaacaacaccaacggcagcggcgataccgacagtgcaactgacaccaccgacgtcaacgccaccgataccaacaccgtcggcacggaaaacgacgcacgcctgcgtgtcctctccacgctgatctcctcccacatcacctccgcattcgcactcggctaccccgacatggacgcgttcctcttctcctgatcgcatcactcccgcagccctattatgcatacgggggtaaaagcaacacccgtacgccgcagaagtcagcccgattgcatatgcgcagcataaccgtttcttcgtaaaaggtctcacgttgccgtgaaacccgatggaaaaaacgccaaactcaccctcgatggctcatcaatgagccagcaacgacaacgtagggcctataggaacttttgtggtgtttatgatcgaggtctggccctgtacgagtaggcgtgtcggcatgtctttttccccgcgtggaaaaagatgcgctcccggtggtgggctggatggtgtgagaacgccatccaacaaagcgaagaaatgcccggcatgcgggcgtgcgatgaagaagaacggacggaccggcaagggcacgcaacggtggagatgccgggcctgccggctgagctcgacgatgccgcagcgcggccgcagacgggcgcggacgctggaggagttcctctcatggctgccggggccgtcgtcccagacggcgtcggaatccacgggcgacgcgcgcgccctgcgcaaacgcatcgcatggtgctggtcaatccagctgcgcatcgccccgccggacgcgaagcgccacacggtcatggccgacggcacgtacatgggccacggctggtgcctgatcatcgccatcgacggcgaaagcggagaagtcctcgccttccagtggtgcgcgcacgaggagctgcgccgctgctgccggcggttggagaaactcttccgcgaggggaactcttcgcctttctcgagccggcgcttgccgcaggtgggccggtggcgcgcaccacgaaccggctggagggcggcgtcaactcggtcgtcaagaacgtgttgcgcaacccgcggactgcccgaggagcacatgctccgcgcgtgcgaatgggtgtgctacatgaagaccgcgcacccgcggccggaatcattcattcccgatgatccgctggaggacgggaaagcgacgtcgcccgaaccggaaggcgacgtctcgcccgcatacgggatcggcatcgactggaacgaattccacactggcacgcgatatcccaacggcaccgactgacgccgagaaccagacctaaagcaccacaaaagttcctataagcccgaaagagggttccgggagaatcccggaaccctctttgctggcggatagggcgagattcgaactcgcggaggggttagcctcacacgctttcgaggcgtgctccttagaccgctcggacacctatccatgcgctgcgaaaaaaacgcaacttgtttattataagtcgatttcccgattacgcaaatcagcgcgtggcgcacctgacaccgctccatcgagcctccatcggcgagctatctacgtttcgaggggtggattcagctcctgcaaaacatctatctgcatttcaaggggttggtggtcaagtatgacggctcgctaatccgcatgattccaatagcgtaacaagccgaatacatcaggtatcgcgtttgagcaaccccctgaaacgcagatagatgacccgagcagcctcaatcaacccctcgaaagcgagatagcccgcaaaacgccccaggcaaccgtcctcacagcagctgctcgtggacggaggcgttcacccattggttctgctggacctgatagcccgagaagatgccgatgtcgagcatgcagtcgcggtaatcgcgcccgtgggcgatggtgatgtagttgtcgtcgaccatgcggttgtgggtggggtcgagcccgatccaacggccgtcgtggtagatctccacccatgcgtgcgtcgcaccctcgccgcccagcaggcccgcgatgtagcgggcggtcagcccgacgtggcggcacaccgagagcatcacgtgcgcgtagtcctggcacacgcccttgcgctgggcgagcgcctgctcggcggtggtgcggatcgtggtcgaggcgggcgtatacgtgaacgcctgatacacctcgtccatcacctcccatgcctgatcaatcggcgtggcatcggccggcagcccggcgatgcgcgcccggcacgccgcgatcatggcctcgatgcacggcccgggaatcgtcagcgccgagttgaaccggtacagcggcttatagatctccgacttgatgtgggcgttgtcgacgaacgcgatgcccttcaccgaatagctgaatatcgtgtgaggctgcgggatgaacccggtcatgaccacggaatcgaacgagtcgatggtcgtctccagttcgacgtccggctcgatggcgacctccacgtccaccacctgctgtcgcggaccggtcgcaggcacgcagcgcagttggaaacgatggtcggtgaccggcgagctgaacgtcagcttcatctcgtagtcaaacaccagtttcttcatgacggcaggctcctcgtcggataatgctcgcaaaaatccactctagtctagcagaaacggcggaggtcatccgtcagctgacggccgccgaccggtcactctccgatcggcggcctgcccctcacggacgcttggcgtccatgttcatcgcgttgagcatgcccgcgtccttcgggtcgccggtgatggcccggctgttgaagtcggtgaggaactcgttcaggcggctcgtcagctccgggtagccgcggctcggcaactgcccgagtagccagctgatgccggacacgaagcatgagggcaacggcatgccgtcgagcgtgcgcgagtaggtctccaacttggcgagcggcgcgtcgagctcgctattgtccagatggaagcgggtgtacaggtcgatgcgctcgatgtacttgccgatgaacacgaacgccttcagtgtgatgtctgcggtggagttctcgatgccgccccagaacgcgagcatgtcgtcggcgatgtcacgctgcgagtagatgtcatccgcgctggcggaacgctcggcggcctcggtgatgttcttcaccgcgagctcgacgtactgcagcagcctcgacgtcagctccgggcgcagcaccacggcgttgttgaacgcggcgacgatggcggagcgcaccgagtcggggttcgtgccgtcgtagaggaaggagtggatgaacccgtcgaagtcctcgaaatcctgcggtaggtcgagcgccttcgcgaacgggcggaacgcgtccacatcggtgtccatcacgcggtcgtagaaggggaagaactgcacgagtgtcgtgaacgcgcgctcggtgtaccgcccgagccagtacaggttgtcggccttcgacgcggtgaccagcgacagcgagtgccgcttcgaatgcggaatgaggttcaccgaggcgaccgactcctcgcgctgcttgtccgtgctgccgtcttcgggcgccagcacccacgtatccttgaatccgccgccctgcgacgagttgacgatcatctggccgggcactgacgagtagcgcgtcaggccggaataccacacgtgcgtgttctgcccggtgaccacgaacgcgcgcaggtcgcacttgcgcgggctcacctcgccactgtccgggtcgatcacgtcgatgtcgcggaactggatgacctcctgcgcgataaaccggcgcggatcctccttgatgcggtcggccagatcctcccgcgcggccttgtcgagcgacgagccgaacacgacgccgtagcctccggcttccgccacgtccttgatgaccagctcgcccatgcggtcgagcacttccttgcggtccttctcgaacatcggcatgtaggtcggcgcgttgtgcaggatcggctcctcgttgaggtagtaacggaccatctgcggcacgaaatagtagatcgccttgtcgtccgcggccccgttgccgggcgcgttgatgatggcgacgttgccggaacggtaggccgacagcagtccgggaacgccgataaccgagtccgggttgaacgcgaacgggtcgaggtattcgtcggacagtcggcggtacacggcgcccacgcgatgccggttgccggcatagtcgaggaagtacagcttgttgtcgacaacttccaagtcttcggggaacgcgagcgccgcgccggtcttctcggccaggtaggcgtgctcgaagaacgccgaattgtagcgtcccggcgtgagcacgacggcgatgccttcggtggatacgaagtccatggccttgcgcagcagccgcggatagtcgcggttgtcgcgcacgtgcacgtcgcggaacagtttgggattcgtacggcgttcgatgtcgcgcgcgaacagcgggtagctggctcccgacgggatgcgcaggttgtcttccagcacccaccagcgcccgtcctcgccttggacgaggtcttcgcctgcgatgtgcgcgaagatgccgccgggaggagtcacgccgttgacttgcggaaagtagccggccgacgtgtacacgtattcttcggggatgacgccgtcgtggatgatgcgcttgtctgagtatatgtctttgaggtaggcgttgagtgcgttcacgcgctgcttgaggccggcttccagctcgtcgaattcgtcggattcgatgatgcgcgggatcgggtcgtatggaaacagccggtcgtggtattcgccgttcttgtatacgccgaaacgcacgccgttgcggctcagttcacggttgatgtctcctcgcctgttgaccagttcctcggcgaattgtcgggctgaccgttctgtcatggcgactccttgtctcacagatacgcatgctgaacgcttatgctctatgatactgaactcgtcccagcgtatgcggccgtggtttccgcattcgctcgaaaaatcgacaatcatgttacgaatcggtcgcgccgcgaacggttcaccggcatgccgaacgtctgccttcgcgcccacccccgcgtctacagcgtgcgcttggcgcgtatacgctcggcccgttcggcgagctcgtcgtcggcgggataggcgacgtgctccagcgtcagcccttgcggcgcgatcggccctgtggagccctcgcgcagcggcacggccatcttctctcggaaccagtcggtcgagcgcttgcccatgccgacctgtatgcagccgccgaccagcgagcgcaccatgttgcgagcgaaggcgtcggcgacgatggtgaagcacagcaggtcggattcggcggccggcgtgcggtatcgctcccccatgccgtcgacgaccagcggccgggtggggatccgccgccaatatgcggttttgacctcgcgaatcgtggtaccgcccggattgggggtggcgaacgagccgaaatcatgcagtccgatggtcatcgcggcggcctcgttcatcgcggcgacgtcgaggtcggcgtcgaggtgcagcacgaagccgcgcagacgcgggtcgacttcgctggcacggtcggccacgcgatacacgtaagtgcgttccagtgcggagaacctcgcgtcgaatccgctcggcgcgaccgtcacgtcatggatggtgatgtccgcgggcagcatgcgttgcagacggtgcttgagcgctacggtcggcgacacgctcatgtgcccgacgcagcggctcagcgtttcctcgccgatgtcgagatggcagacctgatgcgaggcgtgcacgcccgtgtcggtgcggccggcgacggtcaggcgcagcggctcggcgggatcgtcgaccggcacgcgcgtaatcgtgtgcagcacccgttcgatctcgccctgcacggtgcgaatcgtcggctgcttcgcccatccgaagaagccgccgccgtcatatgccaggtcaatgcgcaatctcatcacgcccaccagtatatcgacgccgcgccgagtcccctcccccacctcgcgacacccatgtgccgatacactgtgggcaaatgttggatgtaacggtaaactttgtttatattggagcaaagtcgcaacgaatgcggcgatgcgctaaccaatcaacaaagattccgacaataacagaaacaacattaaccacatacccaatggagagattatgcgattgaggagagtgaaagcggccataggcagtgtcctggcagccgtgacactactgagtatgtcgctgaccggcgtcacggcggcgcaagccagcgatgacaatcttgcactgaatcagaccgtaacggccagttcatatgaagtggcgacgactgcgcccgagaaggccgtggacggcgatctcggcacacgctggggtaccgcgcagaacaaggccgcaaacgaatggatcgaggtcggcttgggcggcaccaagaccgtcaagcagatcaacatcgatttcgagcgcaaagatgccgatcagaacatcaccagttttaaagtcgagctgaagcagggcgacacctataccaaggtgtatcagaaggacacccgcgccaagcaacaggagatcatcctgcttgaccaggcacagcaggcgtccgccgtgaaggtgaccgtactgtccgccgacggcggcaccatgaactgggtcaacgtgggcatcaacgagatttccgtgtactccgcacccaaggagaccgtgctcgacacggccgacacgaaccacatgctcggcgccaccatgaccgcctccagcaacgagacggcgacgctcacccccgacaaggcgatcgaccagaaccgcaccggccgcaacaatcgttgggccagcggctacgagaccccgagcaacatctggctgaaggcggaattcccgcggctcaccgcggtcaaggacatccgcatctatttcttcgagcgtgacgtgaatccgaagcctaccaatgtccagagcttcgacctgtcctacaccgactccgaaggcaccgagcacacgctcaagtccggctacgcgatgacggcctccggggccggttatgtcgctgacgtcgtcatccagctcgatcaggccgtcaacgcccgctcgctcaagctgtcgaacttcgcgatcaaaagctccgaatacaacaacgtgagcgtcgccgaatgggaggcgtattcgaacgatcaggccgagccgggcgccacgctcgacagcgtggtctccgacctcgaatccaaccacctgaccatcgagaccgacaccgacacgctggctctgcccactgtgcccgacggctacaccgtcaagttcaacggcgccgactacgagcagctcatcgccgccgacggcaccgtcaaccacccgctggtcgacaagaccgtgcaggtcgcctacgtcgtcaccgacaccgccaccggcaacaccaagacgacctccgacatcccctacgtcgtcaagggcaccaaccagcagcaggaaggcaacaacgccaagccgaccatcatccccgaaatcgccgaatggcattcgaccagtgccgccaagctggcggcctccgccgtgacgaaggtcgtctacgacgatgattcgctcaaggccgtggtcgacgagttcgtcgccgactacaaggacttcaccggcatcaagctgaccgccaagaagggcgccgccgaagccggtgcgttcaacttcgtcaagaccgactccacggccgcgatcgcgcagctcggcgacgaaggctacacgatggacatccaggccgaccgcgtggtcgccaagtcatccagcgtgaccggcaacatgtacgcgatgcagacgatcctgcagatgaccaagcaggacgccagcggcttcgtgatcggttcgatgcgcgactacccgcgcttcaccacccgcggactcctgctcgacgtggcccgcaagcccgtctcgctggagatgatgcgcgagatcacccgcacgatgcgctactacaagatgaacgacttccaggcgcatctgtccgacaactacatcttcctggagaactacggcaagcgcgacaacgaggacgaggcgttcaaggcctatgacgcgttccgtctcgaatccagcctgaccaacgacaagggcgaatcgcccacggccgaggactactccatctccaagaagacgttcaagcagttcatccaggacgagcgcgccctcggcatgaacgtcgtgccggagatcgacgtgcccgcgcacgccaactccttcacgaagatctggcccgagctcatggtgaagggacgggtctccccgatcaactccaaccgaccgctcatcgaccacctcgacgtgtccaagcccgagaccatcgccaagatcaaggagatcttcgacgactacaccaagggcgacgacccgacgttcgacagcgacacgaccgtgcacatcggtgccgacgagttcctctacaactacacggcataccgtaagttcatcaacgagatcgtcccctacatcaaggacacgaacaccgtgcgcatgtggggcggcctgacttggatcaacgaccacaagacggagatcaccaaggacgcgatcgagaacgtcgagatgaacctgtggtccaaggactgggccgacggcctccagatgtacaacatgggctacaagctgatcaacacgatcgacgactacggctacatggtgcccaacggcagctacggacgtgccaacgcgtacggcgacctgctgaacatcagccgcgtcttcgacagcttcgagcccaacaagatccgcagcagcggcggctaccaggccgtgccctccggcgacgaccagatgctcggcgccgcgttcgcgatctggagcgacaacatcgacaagagcgcatcgggtctgaccgaatccgacctgtactggcgcttcttcgacgcgatgccgttctacgccgagaagacctgggccgccaccggcaaggagaagggcaccgccgcgaaactcacggcgctggccgccaagcagggaaccggccctcgcaccaacccgtactaccaggccacttcgaagaacagcgtctacgagagctacgacttcaacgacgggctcgccgacgccagcggcaacggccgcgacctgaccatcggcgacggcagcaaggccgccgtcaaggaccagtcgctcaagctcgccggcggctccagctatgccacatccaagctcgacaagctcggcaacggcaacgagctgacgttcgatgtgacgctccagcaggctgccaagcccggagacatcctcttcgaggccgacgctccgtacggcactcatgacatccgcgtcatggagaacggcaagctcggcttcacgcgagagctgtacaactactacttcgattacgagctgccggtcggcaagacagtcaccgtgaccatcaaggtggaccagcagaccacgaagctgtatgttgacggcgaattcgtgagcgacgcgaccggcaagtacatcgacaagggcatcgagaagaagaccggcatcaccgccgcgaccttcgcactgccgctgcagcgtatcggctcgaagacctctgcgatcaacggcgtcatcgacaacgtcatcgtcaagaagtccgaggccgagacagaccagtacaacaagtcctgctggaccggcacgaccaattccgagacccaatacaacgacacggaaggtctgctgcggtacgcgttcgacaacaacccgagcaccatctggcattccaactggaagggcgccacggacaagctgaccggttcgaactcgttctacgccgagatcgacatgtgccagaagtacacgatcaaccagttctccttcacgccgcgtaccagtcaggacagcggacaggtgaccaaggccgatctgtacgtcaaggccaacgcgaacgacgagtggaagcaggtcgccacggatcaggtgttcgaggccagccgcgccaagaagaccttcatgttcgacgagcaggaagtgcggtacgtcaagttcgtggccaagtcctcgaacgatggctgggtcgcggtctccgagttcgacgtggcgaacaagccgtcctccaccgtgcgcgtattcgtcgcggccgatccggccgaaggcggtacggtgagcgtagccgccgagggcgaaaccggcaccgatacggccgtggacgtcgcatccggtgcctcggtgaccgccaaggcggtcgcggcggatggctacaggttcagcggctggttcacgacggccagtgagacggcggtttccaccgatgccacgtacacgttcgcagccgacggcaacacggctctgaccgcgaagttcaccaaggactccacgccggatcccgacccgaagccgaccatcagctcgatcgccgtcaccaagccgaccgtcaccgattacaaggtcggcgacacgttcgacgccactggactggcggtcaccgccacgatgtcggacggcagcacgaagaccctgacggccggcgagtacacgctcgcagccacgcaggacggtgccgcggtcgcgcttgacaaggcgttcgccaaggccggaaaggtcactgtcacggtcaccgccaacggcaagaccgccaccttcgacgtgaccgtgacggccaaggatcccgatccggaacccgcgacgctcaagtccatcaaggtcacgtccaagccggacaagaccacgtacaccgtggatgagacgttcgccaagaccggtctcgcggtgacgggcacctggtccgacggcaagacggcgctgctgaaggacagcgaatacaagctgtccgcggtcgacgccgacggcaagaccgtcgacctgaccaagccgttcacggccgcgggcgacatcaccgtcacagtgacctccggcaagctcaccgactccttcacgatcaccgtcaaggcgaagaccgtgaccccgactcctggcgacaacaagccgggcgagaacaagcccggtgccgacaagccgaagccgaacacgcctgacgaggtcgccaagaccggtgcttcggtcacggcggtcgtcttcagcgccctgttgctgttgtccgcaggctacctgctggtgcgtaagcgcaggatctgaccgaatcacgtgtcatcccccgcggatgacacgctgagaccctagagggggctcccggttcacaccgggagccccctcttccgttgcatgcaggtacgtaataacgtgtatatgtcattatcgcctactgttgcgtatctaagtgcgcgccgaaacgacgagtccgcgcacttagatacgcaaatggggctatttgcgttcctaagtgcgcacggttgtcgtttcggcgcgcacttaggaacgcaaccgcatctgatgccaacgcacccgctggcggagggctgtccgtgcaacagactagggcccgtcaacagcctccagtaccacccaacaaacaaaaacaggggctggaaaccagttacggttcccagcccctatcaatgtctatgagacgggtctcactcggccttgtcggcggtctcctcggcagcggtctcggcgggcgcctcaaccggagcttcagcggcggcggtctcctcgaccggagcctcggtagcggcggcgaccttggtggcggcctcagcttccttgacgacagccttcttcgggcttaccggctcggtgacgagctcgatgatggcggcaggcgtggagtcgcccttgcgcggagcgatcttgacgatacgggtgtagccgccctcacgctgctccatctgctcggcaatctgagtgaacagcacgtgcacgacggacttgttgcggatgacacgcatcacgcgacgacgggagtgcaggtcaccgcgcttcgcgaaggtgatcaggcgctcggccagcggacgaaggcgcttggccttcggcagcgtggtggtgatgcgaccgtgctggaacaggctggtggccatgttcgcgagcataaggcgctcatgggccgggcttgacgccagacgcgggcccttcttgggtgtaggcatagtttctccttatagcccgtcggattcaggtgggcacatgcccgaacgtccgaatccgacggttatatctgttgcgaaaggtgacgtcactcgtcctcaggcgagaagaacgtaccaccttccaaattgttggtatcgaagcccagcggcgacgacttcagcgacagtcccatggactgcagcttgtccttgacctcgtcgatcgacttcataccgaaattgcgaatatccagcagatcctgctcggtgtgagcgacaagctcgccgatcgtgtggatgccctcgcgcttgaggcagttgtagctgcgctgcgtgaggttgagatcctcgatcgggacggccatctcggggttggtctcctccgcgacgggagcgggaccgacttcgacgccttcggcctgcacgttgatctcacggcacaggccgaacagctcaaccagggtggagccagcggaagccaccgcatcgcgcggtgaaatggccggcttggtctccacgtccagaataagcttgtcgaaatcagtgcgctgttcgacgcgcgtggcctcgaccttgtagcttaccttgagcaccggggagtaaatcgaatcgaccgggatacgaccgatctcatcggtgtcctgcttgttcatctgcgcggggacgtagccacggccacgctcgacagtgaactcgatttcgagttcgccgtcgtcggcgagggtcgcgatgtgctgatccgggttggcgatggtgacaccggcgggcggtgtgatgtcgcccgcggtgacttcaccattgccgctcttgcgcagatacatgaccacgggctcgtcgtactcgctggtcagcacgatgcccttgatgttcagcagaatctcagtgacgtcttccacgacacccggcagagtggtgaactcatgcagggcaccggaaatacgcacggaagtgaccgccgcgcccggaatcgagctcagcagtgtgcggcgcagcgaattaccaagcgtgtatccgaaaccgggctcaagcggctcgatgacgaaacgggaacgctgcggattgatggattcctcggtaagtgtcggacgctgtgcgataagcactgtgtgtatcctttcagcttctggacggtgatgcactcaccttccgtaagcggttttggatggatgagattgctgagtgctcagacgcgacgacgcttcgggggacgaacgccgttgtgcgcttgcggagtgacgtcggtgatggaaccgacttcgagtccagcggactggagagaacggatggcggtctcacgaccggaacccgggcccttcacaaagacatcgaccttcttgacgccgtgttccatggccttgcgggccgcggactcggccgccatgccagcggcgtacggagtggacttacgggagcccttgaatccgacatcgccaccggacgcccaggacacgactgcgccggacgggtcggtgatggagatgatggtgttgttgaacgttgacttgatatgcgcctgcccgacggggatcgacttgcgatcacgacgacgaggcttgcgcgcggcctgcttaggagctgccattgaccctcgtttccttgtaacgaactgttgttttggattggatccggacgatgggtgtcaccccgtggcccgaatcgacgccaccctattacttggtggccttcttctttccggcgaccgtgcgcttcggacccttgcgggtgcgggcgttggtcttggtgcgctgaccgcgcacgggaagtcccttacggtgacgctggccttggtagcagttgatctggatcttgcgacggatgtccgcgtcgatttcacgacgcagatcgccctcgatcttgtaattgccttcgaggtaatcacgcagcgtaatcagctgctcatccgtcagatccttgacgcgaatatccgggttgataccggtcgcggcaagcgtttccttggcacgagtgcgacctacaccgaaaatataggtgagggcgatctcgatgcgcttctcattggggatgtcgactccggcaagacgtgccattgcgattccttctgtgttcacgcaggtcgtgcaccgagtcttccggtttcccggcccgggcctgcgtacccggggttcagctgttcgctgtgactcagcgccttatttacttgttgccgctggaatctgctctcagccctggcgctgcttgtggcgcgggttcgtgcagatcaccatgacgcggccgtgacggcggatcacgcggcagttttcgcagatcctcttcacgctagggctgaccttcatggttttcctttgcttgtacctatttacttgtaacggtacgtaatacgtccacggttcagatcgtaggggctcatttccagcacgacgcgatcctgcggcaggatgcggatgtagttcttccgcattttgccggaaatcgtcgccagcacgatgtgcttgttctcaagttcgacgcggaacatcgcattcggcaatgcttccactacctgaccttcgacttcaatcacaccgtcttttgccataagccttacagtccattccttgggtgtattacacttgtatgtccgaagacacaccaaatttaaagaatatatcataacgggtcacgacacgccgaggcgtgcatgacccgttataatttcttgctttatccttgctcctgccggcgatacgaccggcagcggcaatcagtcgctcagcgcggcgacgatgttggcctgaatggcgtcgatgtcgccgacgccgtcaatggcgaccagctggccgcggctcttgtacgtgtcgagcagcggagcggtttccttggcgtacgtggccagacgcttggcgatggcctcgggggtgtcgtcagaacggccctgctcctgcgcgcgcttggcgatgcgctgcatcagcacatcgtggtcggcgtcaagggcgacgaccttgtccagcggcgtgccgagctcttcgagcatcgcgtccagcgccttgacctgggaggcgttgcgcgggtagccatcgagaatccagccgttcttggcgtcgtccatggccagacggtccttgacgatcttgttggtgagctcgtcgggcaccagttcgcccttgtcggtgtacttcagcgcctcaaggccgagctcagtcttgttcttgatgttgtagcggaagatgtcgccggtcgagatggcggggatgccgtagtgctcggcgagcagggcggcctgggtgcccttgccgacaccttgcgggcccatgatcagcagtcgcatgtggtctccttggtgaagtgaatacgttatatatgttcgctcccgtaaaagcgggagcgcagaaggatcagccttccttgtggtcgatgccttcgagcaggaagccggtgtactggaactgctcggtctgggccttggcctgacgcagcgtgtcaaggccaacgcccgcgatgatcaggatcgtggtgccgccgaacggcagcttggagttgaggttcagcgccatgatcagcacggtcgggatcagcgcgacgaacagcaggtacacggcaccgaccgtgttgaggcggttcatcacgtagttcaggtaacggctggtggcgttgccggcgcggatgccggggatgaagccaccgtattccttcatgttgtcggcggtctcgtccgggttgaacgtgatcgacgtgtagaagaagcagaagaacacgatcatcagcgcatacagcgcgatgtaccacaccgaagtggtgttggcgaggttcttgttgatccagtcgacccaggactgtcccgacttgccgaactgcgcgatcagcgtcgggatggccaggatggaggacgcgaagatcggcgggatgacaccgctcatgttgatcttcagcggcaggtaggtggaggagccaccgtacatcttacggccgatcatgcggcgcgtgtactgcacggggatgcggcgctggctcagctcgacgaagtcgacgaagacaaggatgaccaccagcacgccggtgacgatgccgaacttcagccaatcgccgttggtgccgttggtgccccaaccgatctcccacagctgcggcaggaagccggagcagatggacatgaagatcaagatggacataccctgaccgatgcccttgtcggtgatcaactcggccatccacatgatcaggccggtaccaccggtcatgatcagaaccatgacggagaggttccacacggagttgtccggaatcggcgaggagcacatgttgttgaacagtgcgccggactgtgcggtcaccagaatcgtggtggactgcagcacggccaggccaatggtgaggtaacgcgtgtactgcgtcagcttggcctcaccggactgtccttccttgtgcagcgcctcgaagcgcgggatgaccacgcgcagcagctgcacgacgatggaagcggtaatgtacggcatgacacccagcgcgaaaatggacagctgcaacattgcaccgcccgagaagaggttgaccaagccgatgaagttttcctggctaccgctaagtgtgttgatacaatcctgcaccgtcttgtagttgactcccggcgtcgggatgaacgaaccaatacggtagatgatgatcatggctaaggtaaagaggatcttgttcctcagttccttggtccgaaaggcttggattaacgtcctcacaaggattcctttccgttgtgcgcgcccggcgcaccgaagcaaacatactctaaccgtcgagtctagcgtacggggtctacccgcagacacgctggtgtgatatgtcgtatgacgagtcgtaatgacagataaggccctcgcccgcgacatgagcggggagggccttatctcattggtcacatgcagtgttgccgaacaacaatcagttttcggaaacagagccgccggcggcctcgatcttggccttggcggaagcggatgccttggcgcccttcacggtgacggccacggtgatgtcaccatcgccgagaaccttgaccgggaaaccgccacggacagcgcccttggcaaccagcgcgtcaacggtgacctcgccgccctcagggaacagctccccaagagcggagacgttgacaacctggtattccttcttgaacgggctcttgaagccacgcagcttcggcaggcgcatgtacagcggcagctggccgccttcaaagcccggacgaacctggtagcgcttcttcgtacccttgtcgccacgacccgaagtcttacccttggagccttcaccacgaccgatgcgagtacggtccttcttggcacccggggcgggcttcagattgtgcatctgcaggagttcatcttcgttggccataatcagtcagcctcctcaacggtaacgaggtgacgaaccgtgagaatcatgccgcgggtaacggagttgtcctcacgaatcacgctctggccgatcttgcgcagaccaagggactgggcggtcgcgcgctgcttgggcgtgcggttcaccagaccatggtgcaacgtgatcttcaggttagccatcactcaccatccttctgttcagcggcggccttggcctgagcctcttcacgagccttcttggcctcggcgatgccggcggcgcgagcgcgaagcatcgcatcgggggcgacctcgttcagggcgaggccacggcgggcggcgatctcttccggctcctcaagctgcttgagggcggccacggtggcgcgaaccatgttcacggcggtggcggagcccatcgacttggtgaggatgtcggtgatgccggcgcactccatgacggcgcgcacggggccaccggcgataacgccggtacccggggcggccgggcggagcagcacggtgccggcggcatcatggccgatcaccgggtgggtgacggtaccacggatgcgcggaacggtgaacatgtgcttcttggcgtcgagctggcccttggcgatggccgccgggacctcacgggacttgccgtagccgacaccgacggtgccgttgccgtcgccgaccacaacgagggcggcgaagctgaacgtacgaccacccttgtgggtcttggacacgcggttgatggtcaccacgcgatcgagcatctcgtcgccgtggttctcctcacgacggttgcgacgctcgccgcgtcggccttcgccacgctgtccacgacgggacttgcgctcatcattgttgttgttctcgggtgccgcagtgttctgagtctcttcagccacttgggtttccttcacttcgttgtcgctcacagtgccagacctccctcacgggcgccatcagcgacggctgcgacgcgaccggtgtacttgttgccaccgcggtcgaacacgacctgctcgatgcctgccgccttggccttctcagccaccagcagaccgaccttcttggcggcctcggacttggtgccctcgaagccagcgaactcggcggtcagcgtggaggcgctcaccagggtgtggcccttggtgtcgtcaacgatctgagcgaccatgtgacggttggagcgggtgacgacgaggcgcggacgctccggggtgccgacgaccttcttgcgaagacgagcgtgacgacgaaggcgcgcgaccttcttgcccttacctagaatcttgacgctcatatcacttaccagcctttccggccttgcgcaggatgcgctcgtccgcgtacttgatgcccttgcccttgtagggttccggagcgcgcagcttgcggatgttagcggcgacctggccaacgacctgcttgtcggtgcccttgacgaccacttcgttagcgttcggcagttcgaaagtgatgccttccggcgggttgacggtgatcgtgtgagagtagccgagagagaactcgatgcccttgcccttggcgacggcacggtaaccggtgccgacgataagcaggcgcttctcgaatccatcgtgcacacccttgaccatcgaggcgatgatcgagcggctcagaccgtgcttggcacgggtgggacgcaggtcatccgcggcggtcaggataatctcgttgccttcgacctgagcggtgatgccctcagggatgacgtaggaatcggaacccttcgcacccttggcggagaagttctgaccctcaatagcgacttccacgccagccgggatggtgacggggagcttaccaatatgcgatgccatgtgtcagctctcctttctcaccacacgtaggcgacgatctcgccgccaatgccccggtcgaggcattccttctgggtcatcagtcccgagctggtcgagatgatggcgatgccgaggccaccgagcggcatcggcagggagtcggacttcgcgtagcgacgcaggcccggcttcgaaatgcgcttgatgccctgaatggaacgctcgccgttcgggccgtacttgagggtgacctcaaggtcctggccgaccttggcttccttggcggtgaagtccttgatgtagccttcgcgcttcaggatctcggcgatgttcgccttgaacttggagtacggcatttccacggtctcgtgctttgccgcgctcgcgttacgcagacgcgtgagcatgtctgcgatcggatctgtcattgtcatgtgggcttgttgccctttctcgccgtggtttccgccgccctagcgcctgcactgcagacgttcgggccgcggaccttcagcgtcgatgtttaccaactggacttagtgactccgggcagctcgccgcggtgggccttctcgcgaaggcagatgcggcacaggccgaacttacggtacacggagtggggacgaccgcagacctggcagcgcgtgtaggcgcgcaccttgaacttcggcttgccggccgccttgttcttaagagcggtttttgccatatcagttctccttgaaggggaagccgaggtgcttgagcagcacgcttgcttccttgtcgtccttggtgctggtcaccacggtgatgtccataccacgctggtgatcgatgctgtcggggtcgatctcgtggaacatggactgctccgtgaggccgaagttgtagttgccctgaccatcgaactgcttgccgttgatgccgcggaaatcgcggatacgcggcagagccagcgtcagaaggcgatccaggaactcccacatgcggtcgccacgcagggtgacgtacgcaccgatggcctggccttcacgcaggtggaactgcgcgacggacttcttggccttggtgatcttcggcttctggccggtgatcagagtgaggtccttgacggcgccttcgatgagcttggagtcgcgggccgcagcgccgacgcccatggagacgacgaccttctggacacgagcgacctgcatggggttggagtacttgaactccttctccagctcaggaacgatgacgtccttgtactgctgcttcaagcgcggagttgccggcgcctcgatagtgctatcggtcatgccagctcctttccggacttcttggcgacgcgcacgcgcacggtcttcaccttgccgtcacgagcctcctgcttaacattcacgccgacacgggtcggctccttggtctccgggtcgaccagcatcacgttggagcgatggatcggggcctccacggagacgatgccggactgctgtccctgctgcgtggcgcggacgtgcttcttgacgatctgcacaccctcgacgatcagacggtcgttgggcagcacgcgggtgacggtgccctccttgccgcgatccttgccgcggatgaccttgaccaggtcgccgctcttgatcttggctaccatgtcagatcacctccggagcgagggacacgatgcgcatgaagcgcttgtcgcgcagttcacgggcgatcggtccgaagatacgagtgcccttcggttcacggccggagccgagaatgacggcggcgttctcgtcgaacttgatgtaggagccgtcgacacgacggtgctccttgacggtacggacgacaacggccttgaccacatcgcccttcttgaccgacccgccagggatcgcgtccttgaccgaggcgacaatgacgtcgcccaggccggcatagcgtcgcttcgatccaccgagcacgcgaatggcaaggagttccttggcacccgtgttgtcggcgacatgaagccgcgtttcctgctgaatcattgattctccttagccgagctggttctccccgagcaccctgcctgcctataccagcgcaggcagggtgtctcgcggagccttgccgaacttgtttacttggcgcgctcgatgatggattcgagacgccaacgcttggtcttgctcagaggccgagtttccataatactcacgaggtcgccaacgtgggcgtcgttgtgttcatcatgggccttgaccttcttggtggagcggacgaccttgccgtacagcgggtgggtcgaacgctgttcgagctcgacggtgatggtcttgtccattgcctcggacacaacataaccgcgacgaaccttgcggaagttgcgctctgtagtatcagccatgcttacttctcctccgacttggtctcggtagcctcaggctcctggctgatgccgagctcacgctcgcgcaggacggtgtacatcctggcgatgtcgtgcttgaccgccttgaggcgggcagtgttgtcgagctgaccggtggcagcctggaagcgcaggttgaacagctcttccttggacttcttgaggaagccctcgatctctgcgttggtcttctcgttcagattcttgattgcgtaatcagcggtaccgactgccatcagatatcaccaccttcacgtgcgataatgcggcacttcatcggaagcttgtcgatggcgcggcgcagagcctcgcgagcgacttcctcggacacgccgccgatctcgaacatcacacggccggggtggatgttggcgatccagaactcgggggtacccttaccggaacccattcgggcgcccagcgggtgcttggtcagcggacggtcggggaagatgttgatccacacacgaccaccacgcttgatgtagcgggtcatggcgatacgcgcggcctcgatctgacgattggtcacgtacgccggggcaagcgcctgaatgccgtaatcgccgaaagcgatttcggtaccgcccttggacatgccagagcggcccggacgatgctgcttacgatatttggtcctctttgggataagcatcagctcactccttcgtttccgttgcggcaggagcctcggcggcggcctgggcctcagccggagcggcttcggtcgcggccttctgctgagcgccggcggcacggttgccacggcgcgggcggcgatcgccgcgacggccctgacggttgttgttctgctgcgcctgctgctcttcgaactcacgctcggtcatgtcgcccttgtagatccagaccttcacgccgatgcggccgtaagtggtcttggcctcgaagaagccgtaatcaatcagagcgcgcagggtctgcagcggaacgcgaccttcgcggtagaactcggaacggctcatttccgcaccgccgaggcggccggagagcttgatacggatgcccttggcaccggcgcgcatggcgtcctgctgggccttgcgcatggcgcgacggaaagtgacgcggttggtcagctgctccgcgatgccctgagcgacgagctgggcgtccagcgcggcgttcttgacttcgaagatgttgagctggacctgcttgccggtcagcttttcgagcttggcgcggaccttctcggcctcggcaccacggcgtccgatgacgatgcccggacgggcggcgtggatgtccacgcgcacgcggtcacgggtacgctcgatgacgatacgggacacgcccgcacgctcgagatccttgttcatgaccttgcggatcttgtcgtcttcgagcacgaaatcactgtagcgctcgccgaccttgttggaatcggagaaccacttcgagcgatggctctcagtgatgcccagacggtatccgaacgggttgatcttctgacccatctcagcgatccccttccttgttggcaacgatgaccgtgatgtggctggtgcgcttgttgatacgagcggcacggccctgtgcacgagcacggaaacgcttcagcgtaacgccctcgtccacataggtcgtcttgacgaccaggtcattctcgcggaacggctcaccggccttgtcggccttgacgcgagcgttggcgatggcgctctccagcaccttgcggaccggaagggccgcggcctggggggcgaacttcaaaatggtaacggcttcggtggccttcttgcctcggatgaggtcgaccatgcggcgagccttgcgcggcgtcacgcggacgtgacgagcgattgctttagcttccataagtcattctctcctttagcggcgggccttcttgtcgtccttcacgtgacccttgaaggtcttcgtgggggcgaactcaccgagcttgtgaccgaccatggcctcggtgacgaacaccgggacatgcttgcggccgtcgtgaacagcgaaggtgtgtccgatgaaatcaggagtgatcatcgaacgacgagaccacgtcttgatgacgttcttggtccccttctcgttctgctcgtcgactttcttctgcaagtgggcgtcgacgaaggggcccttcttgatgctacgagtcatcttctcgatactccctttacttgcggttcttaccattcggacgacgacgaacaatcatcttgttcgaagccttcttcggacgacgagtacgaacctcacccttgccccacggcgaaaccggcggcttgccaccgcgggtacgaccgccgtgcgggtggtcgacggggttcatggactcaccacgggtccacggacgcttgcccatccaacgggcgcgaccggccttgccgagctgaatgttggcgtgctcggagttgccgacctcaccgatggtggcgcggcagcgagcatccacattgcggatttcgccggacggcatacgcagctgggcgtaggcaccgtccttggcgacgagctgcacggcggcaccggcggaacgcgcgatcttcgcgccgcccagcggacggagctcgatggcgtgcacgatcgtaccggtcgggatgttcttcagcggcaggttgttgccgggcttgatatcggccttctcgccggtctcaatggtgtcaccctgcttgatgccctcgggggcgatgatgtaacgcttctcgccgtcggcgtagtgcagcagcgcgatgcgagcggtacggttcgggtcgtactcgatgtgagcgaccttggccggcacgccgtccttgtcccaacgcttgaagtcgatgagacggtactggcgcttgtggccaccgccgcggtggcgggaggtcatacggccgtaagagttacgaccgccggtcttgctgagcttgcgaaccagcgacttctcaggcgtggtgcgcgtaagctcggagaagtccgagacggacgcgttacgacggcccgcggtcgtcggcttataaacgcggatagccataatatagttcttcctttaacttttctcggctaaccttcagttgccaaagatgtcgatcgactggccctcggcaacggtcacgatggcgcgcttctgggaaacacgctggccgaaaccggtgcgggtgcgctggcgcttgccggcgcggttgagggtgttgacgttcgtcaccttgaccttgaagatctcttcgatagcctgcttgatctgcaccttgttcgcgttcggagccaccacgaaggtgtactggccgcgatcggacagggcgtagctcttctcagagacgacaggcttcaggatgatgtcatgtgctggcttgtgaatagcgaccatgatcaggcctccttggcggccggcttggtcttcgcgtcgacgaaggcctcaaggccttccttcgtgaagacgacgtactgagccgtgaccacatcgtacgtgttgagctgatcggcgaagatcgggtgaacggtcgggatgttgcgcaccgacagccactcgttgacgttatcgcgggagaacaccacggtggtgaacttgttctcggtcaccggggtgagcgcggcgatggcggccttggtcgacggggtgtcggtgacaccgaagtcaaccacgacgacgcggccggcgttggcgcgatcggaaagcacgtagcgcagggccgcggccttcatcttcttgggggtgcgctgcgagtagtcgcgcggctgcggaccgaacacggtgccgccgtggtaccactgcggtgcacggatggagccctgacgggcacgaccggtgcccttctgcttccacggcttcttgccaccgccggaaaccatgccgcgggtcttggtggcgtgcgtgccctgacgggcggcagccagctgggccacgacgacctggtggatcagcgggacgtgagcctggacctcgtcggcggtgtggccgaagagctcggcgggcgcctcaacggagccagtggcctggcccttgccgtcagtgacgttgagagtaacgtttgccatgataatcaggctcccttcactgcggtgcggacgaggacgatgccgcccttggggccgggaatggcacccttgatggcgaggacattgttctcggcatcagcggacatgacggtcaggctctggacggtcgcggtcacgtgacccatgcggccggccatgcgcttgcccttgagaatacggctcggagtggcgcatgcgccgacggagccggggcgacgttcgttcttgtgagaaccgtgggtacgacggtaggacttgaagccccagcgcttgatcgtgcccgcgaagcccttgcccttggtggtgccggtgacatccacctctgagccctcggcgaaagcgtcgatggacagctcctggccgggctcgtactcggcggcgtcctcggtgcgcacctcaacgaggtggcgacgcggggtcacgccggccttggcgaagtgaccagcgagcggcttggtcaccttggtgggatcaatctggccgtaaccgatctggatggccttgtagccatcggtctcctcggacttgacggccgtgaccacgttggtggacacatccaccaacgtgacggggacgaagaagccgttctcgtcccacacctgcgtcatgccgagcttgcgacccagcagagccttgtggctacctctttgcgaagtcataacgatccctcctcccttacagcttgatctcgatgttgacatctgcaggcagatcgatgtgcatcagagaatccacagccttgggggtggggtccacgatgtcgatgagacgcttgtgcgtacgcatctcgaaatgctcgcgagaatccttgtacttgtgaggagaacgaataacgacaaacacgttcttctcggtcggcagaggaaccgggcccaccacagtggcacccgcgttcgtcaccgtctcgacgattttcttcgccgattggtcgatgacctcatggtcataggacttaagcctgatgcggattttctgtcccgccattgccgtccgccctttctagcgattcgttgactattaccatcctgctaaagggcaccggcgagcatgacacacgaaaatacttttcgcggccataaccacatcagtgcgtagacatgcaagaagcccgtcgaaacggaccccttgttccacgctcgcttttttgattccaatttgcgagcccaaaacaggcaacttgttaattaaagcaccaggggtacctatagggaattcgggcgtgtcgcacgcccgaatcctgtcatatcccctcagggctgccgcccctcggcgctatctgcgtttcgtgaggttgtcagagcacgatcccctcggtatcactgccctacggttgttggaatcatgcggttcccggagcgcctctactctgccatcaacccctcgaaatgcagatagcccattattctcgcctctcagtgcgccgatacacctatccgtacacgattttcaatgggctatcgggaaaggcagtagccaaacggccccgcgcacggttttcgtgctgtacgatgacaaccaacttgggagagacattcaggctcgccctcgccgcgctgcgttcgacggtcggcgatgcgaagttccgtgagatcgagaagacctgggtgcaggaacatcaggagcagttcgacccgactggtctgaagattaccgcgacttactccgacaagtccacgaaggccatcgacccgaccgatgaggccgtgacctatcactacgacttcgcgaagccgtccggcgcggcgaagatcacggtgacctatgacggccagaccgcatcgttcacggtcaaggtgacggccgatgccggaaacaaaaccggcaacaaccccaagcagcaggcatcgccggtacaaaacggcagcacctcgacgcagccgaacggcgtgtccaacccgctgtccaagaccggcgccagcacggctccgatcatcgccctgacggcactcgcactgctgacgggcggcgtcaacgcggacccgtatggctgttcgccgcatggctgcgccgggagcgctcgctgtggggcaacgccgtggccgtgctcgccacatcgatgatgacggtggtcatcgcctcgttcggggaccggctgccgccgttatgcggggctggtggcggccaggtttcgtgcgatgccgtggcgcagtatcggcagggcattcgcgcactgcctgactggcgttcctggactgatgtgcaggcatggtggccggcgtattccgcgccgaaggcggcgttgacggccgcgatcgttttcgcgctgacgcagtatggctcggtgctgttcgccaaaacgatgattcgcgaatacgggaagcgatcctacttggtggcctcatgggtgtggcacgcggcgcttgccatcaccgggttcgccgtcaatatgtggctgggtgtcgtcgcggtcgtcctgctgacgcagtcagtggcgataccgctgcgattccgcgggcaacgacggccgaaaccgatgatcgccggagtcaccgaagcgatgtgcctgctactggtgttcatagcggccatcatcatctgtcctcatctggcatagcggcgatccgcctactccttcctatccgactccttccccgaccatagtcccatttcagaggccgcagatgggactttggcgggatgaggtggccgtgttgttcgtgaggcaggtcacagcgcaggcgctcccctatgcgaagcccgcgttgaagcgccccgcgtgctgcattatcgtaatcaccgtgacaaaatcgcaagctgcacagatcaaacccatcacggcgcatcacgccaaccagctgtatcagcacggcacgctggcgctgctggtgcccggactgctcgaaggcaccacgaccatcggcgaactgctcacccacggcgacaccggcatcggaaccggcgcggggctcgacggcgagctcatcatcctcgacggcgtcgcctataaggtcggacaaagcggcgtggcggaacgcgtgccggacgatttcaccatgccgttcgcgaacgtgcatcacgccgcgttccaataccagtgcgagcgccgcgatatcggcctggaggatctcaacaaccgcatcgtcgaggcgaacggccgcgccaacacgttcttctcggtcatcgtgcgaggcaccttcagcttcatcaagacgagggcagtcatcaaacagcaggccccgtacccgactctggtggaggtcgccgaccggcaggcgatgttcctgcggcacgacgtgaagggcacgatgctgggatatttctcgccggagatgtttcatggagccgccgccgccggttttcacgagcattttctgtcagacgatcgcacgttcggcggtcacgtgctcgacgcggtgctcgatcacggcaagatatacagtcaggtgttcgacacgctggtgcagcatctgccggtggatgatcctgagtatcgcaaccacgatttccggcatgatccgatagccgaggcgatcaccgccgcggagggagacaaggcaggtaattgacggattcagtgggtagtcgcgaagagaagattagtggaggtaatcactgaatccgcgtgaccacccaccggcactacgtgtcacctcccgccagcgggaggcaggaatggcctgaaataattgtgggggccttccgcataggaagacccccacattggttcaatcacctgggatgggtgatatcatgccatcgtcagacgcgctcggacgcctcttcggtggcggccacaccctcgcgctcgacgcgaatcttgtggccttcggcctgcggcacgccgtagtatgcggccacggcgatgtccttcatgtcctcgatcatcgggatgcgcgggttggccggggtgcactggtcctcgtaagcgcgcatgccgatctggtcgagcacgctccagaagtagtcctcttccacgccgcagtcctggaaggacttgttcatgccgagcttgttgtcgcggtagtcctcgacggccttcgccagattctcgacgccttcggccggggtcttgcccgggtcgatgccgatgatgcgggcgatgtcctggtagcgcttgtcggcgacgtacttgttgtacttcggccagctggtcggctcctccgggacggcaccgttgtagcggatcacgtacggcagcaggatggagttggtgcggccgtgggcgatgtggcacagggcgccgatggtgtgggccatgccgtggcacatgccgaggaacgcggagccgaacgccatgccggccatggtggcggcgttgtgcatcttctcctgcgcgtcggtcttggcgagccccggctcgccgttgacggactcggccaggttgtcccagatgagcttggccgcgtgcagggccatgccgtcggtgaagtcgttcgcgtacacggacacgtaggcttccatggaatgggtcagggcgtcgaagccggcgtcggaggccagcttgcgcggctgggtgcgggccagcaccgggtccacgatggccacggacggggtcagcgcgtagtcggtgatcgggtacttgtatccggtcttgtggtcggtgatcacggcgaacggcgtcacctccgaaccagtgcccgacgaggtcgggatgcacacgagcttggccttctcgcccagcggcgggatacggaacgcgcgcttgcggatgtcgaagaacttctcacgcacgtcggagaaggagatttccgggtgctcgtagagcagccacatgatcttggccgcgtccatcggggagccgccaccgaccgcgatgatcgtgtcgggctcgaactcctcgcgcatcatctcggcgccgcgctctacggtctcgacggagggctccggctcgacgtagtcgatgattcggaaggtgacgcgattgtcacgggcgcgcagctggtcgatgaccttgtcgacgatgccgagctgctccatcaccttgtcgcacacgatgacggccttctcgatgccgtgcatgtcgcgaaggtacttgatggcgttcggctcgaagtacgtcttggccggaatcttgaaccactgcatgttattgttcctccgagcgatgcgcttgatgttgatcaggttcacggcctggacgttgccggacaccgagttgccgccgtaggagccgcagcccagggtcagcgacggggcaatcgcgttgtagatgtcgccgatgccgccgagcgagctcggctggttccagatgatgcggcaggcgtgcatgcgcaggccgtactcgcgcaccagcgcctcgttgttcgtgtggatggcggcggtgtggccggcaccgagcttgagcatcttctcgcacatctcgaaggcctgctccttgtcgtcggccttgagcacggcctgcaccggggcgagcttctcgtgggtcagcggctcgtcgtcggagacctccttgcattcggcggcgaggatcgtcgcgtcggcggggatctcgaagccggcggccttggcgatgaactgcggggacttgcccggcaccacggagttgaggaccggcttctggccggagccggcggtgcagccgaacatgtactgctccagcttcgccttctcgtccgcgttgacgaagtatgccttgcggcgcttgagctccttgacgagcggcgcgtagacgtccttgtgggcgatgatggcctgctcggtggcgcagatcatgccgtaatcgaagtgcttggagaggatcaggtcgttcgccgcacgttcgatgtccacatcggtatcgatgtaggccggagcgttgccggcgccgacgccgagggcgggcttgccggaggagtacgcggccttgaccatgccggggccgccggtggccaggatggtggcgatgcccgggtgcttcatcagcgcgccggtcgcctcgatggacgggtgttcgatccactgcacgcagttctcgggtgcgcctgcttcgatcgcggcgtcgcggacgatcttcgcggcggccacggacgacttctgggcgcccgggtggaagccgaacacaatcggacagcgggtcttgagtgccagcagcgacttgaagatggcggtggaggtcgggttggtgaccggggtgacaccggcgacgacgccgaccggctcggcgacctcgtctatgcccatgacctcgtcctcgcggatcaggccgacggtcttctgcccggccatgtagtgggtgacgtgctcgcaggcgaagatgttcttggtggccttgtcttcgacgagaccacggccggtctcatcgacggccatcttcgcgagcaccagatgcttgttcagggccgcgacggacgccttggcgacgatgcggtcaacctgcttctgatcgagcttctcgaactcgtcaagggccttgagacccttcttgacaagggcgtcgacctcggcttcggccgccgcgcgcttctcctcggggctcggcttggcgggcgcctcgacctgtgttgcttctgccatgtatactcctcgactagctgtggtttcattccgttgtcgttgccgccatcacctggcggatcatccatccacatgctcgctattgcgcatctgtggcctacgtcacaatctacgtgatatactgcgcaaacgcacacgaacaaaaacgacggcgtttcgtgtttgtttttggtatttatttgttgctatttgttatatttaaccctgttttactgctgatattccacgaaatggtatcttttgttcgctttttgcgacatcgcacaccatcaaacgaatttccgagacacaacttatataaagtatgtttataaaagttgcactcgtcgacgaacttttataaaattacttattaaaagcggtgtcatgcgtccggcaccacacggaatcgacccagcaacgaggccccaatgacgaccgcggacaccgacatcgccgcaacccgaaacatcaccaagacgcgcaacaggcaggccatcatccgccacctcacaacgcacggcaacgtcaccaagcgccagctgcagctcgatctgcagctgagcctgccgaccatcaccggcaacatccgcgcgctcgaacacgacggcatcatcgcccccggccccctgaccgactccacgggcggccgcaaatcccaaagctaccggttcaacccgagtcatcgcaccgcaatcggcgtcaccatgcaccgcaacaccctgcgcctatgcgccatcgacctgcaggggcgccccatcgccatcctctcgcgcacgctcccctatgccaacaccaacgcctactaccagcggatgggttcggcgatcaacgatttcgccgcggagaccgaaaaggcccacggccccgtgctcggcgtatccttcgccatccccggtgccatctcggccgacggcgccgtcatcaccttcaacgactcgaccggagcgaccggcgtcaccatcgacaccatcgcccagtcggtgcgctacccgcgtcaactaatccgcgaggccgcggccatcgccatgaccgaaacgctgcacgacaccgccatcagcgacgccatatgcctgtacctgaaccgcagacccagcggtgcgctcatcatgaacggccgcctgcaccgcggcccgaacctgtgcgatggcgccatcgaacacatgacgctcgtcccaggcggcaaaccgtgccactgcggcaggcgcggctgcatggccgcctactgctctcccgaaaacctgccggaggactacgagagcatccccggcttcttcagcgtgctggagcaaggcgagacccatcaccgcgagcgcatgaacgactggctcgaccacgtggcgctggccatcgccaacgtgcggtgcgtcatctgcgccgacgtcgtcatcggcggggaggcggcgctgtacctcgaccacgacaacatcgccgacctgcagcggcgggtcacggccctcagcgtgttcggcaccgaccatctcacccttcggctgagccgcagcgacgagaacagcggcgccatcggcgcggccatgcagttcaccgacccctacatggacgcgctgtgcggctggaacacgggcccgcacccgtcctcgcccgctccgacacggacgaaaatcgacaccgctacaatgggtgtatgaaacacgcgatacctcagcggtatgcaatccctcatcgctatgcgacacgaccgggcctgtacttcacggaagacggcggcgccgatgtcatcgtccgttccgaaacagccgatcaggtgtggctctgcatctacgagaaggtcgatcaacccaccgccttcttcaacgacgccatccgcatcttcgatgattcagcaacgccgttcatcaacgaaatacacgagcacgccgtctgcacgcgcatcatcgagcccatgtacgtgcgcgagacgctgttccgcatggatgggccgaactacggcctgtggtacgtgcatcttcccaaggcgtgggacggcatgcgctacgcctaccgagtggacggcgcgtgggatccgagcaaggggctgcggttcaacccgtacaagctgctgctcgacccgtatggcaaggggatcgacggccgcatgaagctgtcgccggccgcgttctcataccagtgcgacgtcagcgaggatggcaaggtgcgcggctccgcgttcgggccgatgagcaccgtcgacgcactgggcaacatgcccgtgtcggtggccatcgacgaccgggacaagaccaagcacgacgccgacccctcgcacccgcacgtgccgtggagcaagaccgtgctgtacgagctgcacgtcaagggattcaccgcgaacgcaccctggctgcccaaggaactgcgcggcacgtacgcgggcctcgcccacccgaccacgctctcgtacctgcaatccctgggcgtcacctccatcgaactgctgcccatccagaccaagcaggacgagctgttcctgcaggagcgcgggcggcacaactactgggggtactcgccactcagctacttctcccccgagccttcgtacgccactgccgaagcccagcgcaagggggcccgggcggtccgcgacgaggtcatcggcatggtgcgcgcgctgcatgaggccgggttcgaggtcatcatggacgtggtgtacaaccacacctgcgaaggcggcgtggaagggccgacgacatgctggcgcggtctggacgcgctcttgtattaccggcgtcagaagggcaatatcgggcggcttgaggacaccaccggctgcggcaacaccttcgacttcaccaacacgcacgtggtgacgttcgccgtggactcgctgcggtattgggccaagcgcatcggcatcgacgggttccgattcgatctcggcgtgtcgctggcgcggctggacggggacttcaccaagcatcacccgttcctgtatgcgttgcgttccgacctgctgctcggcaacctgaaactcatcatggagccttgggacctggggccgcagggatggaggaccggcggattcggcatgccgttcagcgagtggaacgaccggttccgcgacacggtgcgccgattctggatcaccgacacccaaccgggggcgcccagcggtatcggcatgcaggagatggccacgcgactgtgcggttcgtccgacctgttcgccacggagcccgggcgcggatgcgtgtcctcgatcaactacgtctcgtgccacgacggattcacgctcaccgacctgacccgatacgcggtcaagcacaacgaagccaacggcgagaacaatatcgacggatcgaacgtgaaccactccgcgaacttcggtgtcgaggggccgtccgacgacccggcgatcatccgcaaacgcgagcaggccgccatgaacatgctcggcacgctgatgctgtcgctgggcacgccgatgatgctggcgggcgacgaattcggcaactcgcagagcggcaacaacaacgcctatgcgcaggacaacgacatcacctggctgaactgggactggatgtaccagacccgcaaaaccatgcagatgcaccgcctggatacggtgtcccgactgctgtcgatacgcaagtcgctgggactgtaccatcacgaggagttcttcacgcggctcacgcagctcggcctgttcaagccgtcgagccgcgtgcaatggtatctgcccgacggcaccacgccgatggatcgggactggttcgacacgacgatacgcagcttcgcgatgcgactgctctcgcaggatgaggtcgatgtgctcatcgtgatcaacggcgtcgacgaggtacgccggttcaccctgccgagcgactgctcctggcagtgtgactggagttccgcgaccgcggtcggactgcggccggcgccgggcgatcggctgcagcgtatcggcaagaaccaggcgctgcgcagcaactggaccatgtccgtcagcgagaaggacaacatccatcagctattgaagaccattcaggcgtcgctggccgagcaggacaagctggatctgtttggcgccaccacagagcatgccgatgtgctgttcgaggatgacgagcaggccccgggcgttggcgcggatgtttcggcgaccatgtctgcggccagtaccgtgcatggcgcttccgcgtcgacccgtgatgacggcaacgctacggttaacgggtcggcggtatggacgatgcccgcactcagcatcagcgtgatgcgcaggctgcagtagaggtgctcataacgaacgaggccctttcgggaaacgatgtttccgaaagggcctcgcgatagccagaactggcgtatattaacgcttcgagaactgcggagcgcgacgtgccttgtgcagaccagccttcttgcgttccacgacacgggagtcgcgggtcagcatgccggccttcttcagggcggcgcggttggcgtcacggtcgatggcgttcagagcgcgggcaacgccgagacggatggcaccggcctgaccggtggtgccgccgccgtcaacgaggacgatcgcgtcgaacttgccttcgagcttgagcagcacgatcggggagttgacctcacgctgcagcagcttggaggggaagtactcctccagggtgcgcttgttgatggtccacttgccggtgccgggaaccagacgcacgcgggcgacggcttccttgcggcggccggtgccgtagcccggagcaatcgcggaagtgccggtgccggcacccgcgttggtctcggtggtgtagctggtgagctcctcttcggttgcctgagccgcggagtcgttggtgttttcagccatgattctctatctcccttcggttcacttggcctgctgcgagacctgagcgatctcgaaaacctgcggctgctgcggggtgtgcggatgctcggcaccacggaagatgcggagacggtccagctgcaccttggacagacggttcttcggcagcatgcccttgacggcagccttgatgatgcgctccggcttgttcgccagcagctcggcgtagctatcgcgacgcaggccaccgggacgaccggagtgcgagtacagttccttgcccatcttgttgccggtcagagcgatcttgtcggcattgatgatgatcacgtggttaccggaatcggcgtgaggcgcgtaggtcggcttgttcttgccgcgcagcagcgtggcgacctgagtggccagacgaccgagcaccacgtcggtggcgtcgatgatgtaccagtcatgagtcaaatcggctggtttcggagtgaaagttttcactggtgtaccttttcttgcttattgtgttccgggcttggactgccgcgctggtcaggcttggcggtttcggcctcattatccgtgggctccctgaaagtcctcgatggcgagtgggaaagcgctttgaaggaccccttagggaaacacaacaatcctctatgataacgccacctttgacatttcgcaacgccgcacgacacacttcatcatccggccgaacgacacctcatgtacggccggatggcatgcccatatcgcaccctcagcgcccctgcatgaccttggcaagcgagagcagccgcgtgttggagaacagctcctccagcggcacgacattgcccttgccgtcggccagcgggatgcgccagttcggatattcgttgttggtgccgggctggttctgggcgcggcgctctcccacgccgtccacgatggacgccgcgagcagcttgcacggggagccgcgcagaccgcggtacagcgcctcgacgatctcctgctcgtgggctttctcgtccttcagcaggtcggggtcgagataaccgttgacgatcagcatgaccatcatggccttgtgctcggcgcgcgcgttctgctcgaagtcctcgaccgatccttcgatcagtcccaggcgctcgcgcagttcgacgtgctcgtacgcgagatatccggctgcgggcggcaggtcgtgcgtgttcaccgaagcgagcgagaactcgcgccaatccttcggggcgcggaacttgccgtccatctgctcgaaccattcgacggcgcaacccagcacctgatgcgcggacagcgacgtcgagacgtggtccggcacgacgcccagatcctcgccgacgaccacgccgtgggcgcgtgacgcctcaagtgccaggatgccgagcatgatctcggaatcgtactgcacataggcgccgtccttgggcgtgtgcccggaggggatccaccacaggcggaacaggccgaggatgtggtcgatgcgcaccgcgcctgcatgggcgaacatgccctgcaccatgtgacgatacgtgaggtagccggtgttctccagctcgatcgggttgagtggcggctggctccagtcctgcccctgctggttgaagtaatccggcggcgcgccgaccgtggcgcccttggcgaaacactccgggttccaccacacgtcggagccggacggatgcacgccgaccgccatgtcggccatgaggccgatctgcatgccggcgtccttcgcggcctgctgagcggctcccagctgctcgtcggcgatccattccaaccagcggtagaagtccaatgtgtcggggaactgtcgacgcagcccctgcacctcttcgctgttcttgtcgaggcgcttctcccagctgtcggcttcgccggtcggcgcgccccacttgtcgtagcacaggcaccacgtggcgtaggcctcaagcccttcggcggacgtgctcttgtagtcgtcgaacgccttctgacgctcctcgctgcgcccggccttaaaaatcagccacagggcgtgcatcttcacgcgccacatcgaatcacggtcgataatctgcgcgtccccgttcagcggttcggcctgcgcgtgcagctcgccgatctgcgatttcaggtcatcgccgaggccggcatattcctcgatcgcctcgggacgaatgtacgtgaagttgatgaagcggcgggaaatcggcaggtacggcgacggggtgagcggcgctaccggctcgcacgcgtgcagcgggttgaccagcatgaaatcggcgccggtcttgctgtgcgaatcgaccatgagggtcttgaggtcctcgaaatcgcccacgccccaggatccggcggaccggatggaatacagctgggccatccagccccacagctggtcatgttccatggccggcagcatcggaatacgctcgggggcgctgatcagcgtggcatcctgcgtgcggtcgcccacgctgacatgcagcgtatggtatcccatcggcagatccgcgggtatggtgatggatgccgtcgccacgaacttgccgtcgacctcgtacgcctgcgatccgtctccggctcccggctccagcgcaccctggtattcgtcgccgttttccagcgtgatggttgcggagggaatctgcatgataccggtgttgagcagcacacgatcttccttgccgacgacatgcaacacggtcggggcgacgagacgcccgtggcgctcgcgaaggatacggacaacggaatcatcgatggcgtcatcgtcatgggcgtccacgcccaacgcacccagcaacgccttcaggacatcatcatcgatctcgtgatagtcgtcgctcatgccgatgtagctcgtggccaatccaaccagacgcgccagatggatcagcggacgcgcgagacgctccgcactttctgtactctctgtcatattccttagtgtaagcccgcttttgcgcggcacgcttacgtataccgcgaattgcgccagattttacccgcgattatcgcctgatccgccggcggtggacgggtcggaacgaaacggggtcagtacgggggtggcaggagggagcgcagggagggtgtcgcgcaatgatgcgtcacgaggcgtccgaggtccggctcgccgcggctttcgccacttcgggcgaagggtcgtcgcgcaaccggtcgagcgtctcctgcgaagtgccggggttcaacgccaccgcgcgccgcaccatcgtcgcgagaatcgccggggcaccggattcctccgatactccgagccttgacagcacgtccagggtgtcggcgtcaagatcggtgttctgcgctccctccagccgcatcttccatgatgtgcgcttgttgcgcagcgccgcgtcgcgcacctcggggacctcgtccttggtcaggcgccccaccagccagttcttgtcgtcctcgttggccgccacggccctgcgcacgtccggactcgggtccgtcgacagcttgaccaggatgttcgggaacggcatcgtctccgccagcatgatgcgatcttccaacggcgtgtgccggttgccggcgacggcctccagcagtgccgtcgcacgggagaacgccgcctgatcggaacggtccggcaacggacggcgcgcgaacccggacagttccgcgctatcggtggagtgccgcagccgctcatacgtggcggtcagaggctcgaagggcgtggagtcagtggcgctgtcgggctgagactgcgctgcagtctgcgctgtggcctcgcgcaccgtggcctcgtcatcatgtcgttgcatctcgctcatagtcatcaccatacccgaggggtcgccgaaccgaaccatatcttccgcaaagtattgcgttcctgctgacgggtgagctgagtaccgcaaaaccacccccagacatgctgcgcataacatcgcgcctgtttagattgcgacgggacggcttatcagttcaccggattcgggcgtcaccgtcgcgctgaacgcctcacgcacgcgccggaaaaattcccgctcacgctccaccggcaccaccgcgtccagtacgacacggtcactgtaccgctcattctccagcgcggccccgcaatccgaggcgagttgacggaacacgtcaaattgcgggtactgcagcgctgtcgtgtatctgcggcacgtctcgatggacgccagtctggccaccttgacgcccagcgaggcggcggacgaatacgcgcgaatcagcccgcccgaccccagcaggataccaccgaaataccgggtgaccgtcactgcgcagttcatcagatctccctgccgcagcacgtcgagaatgggcttgccggcggtgccggatggttcgccatcatcgctcatcctctcccgcacgcgaccatcgccgtcgacgcatatcgcggcgtacgccacatgccgggccttggggtgcagctggcgaacggaatcgacgaacagcagcgcctcgtccaacgcatccacatggcacacatcggcgatgaactcggacttcttctccaccagtgcgtcatgcgccggccggtcggacgtgtcaagaacggttttcatcggtgatgttccactccttcacgacgttcttgtcggcgcccatcgaatagatgacgttccatatgcgctggcgcacctgcgcatcctgcgattcggaccagcatgtgccgttgggatggtcgctggagatcggacaccactggtatgagccctgccgcatgttcgcggtcggcacccagtcgatgcggctgacgcgccatgccccggccacgcccttgcggccggcgaactggatgcgggcggtcacgccctgattgttgacgattctgctggcgggggcgctgaccgtcaccgtgttgccaagcccgtagatgatccacgtgccgttgtagttctcgatgggctgcgcgcaatggcatccggcgccgtagatcacgtcgaacgcgccggtgtccgcgagctcatgcgcctcggagacctgccacgaatcggcgtagtcgatgtattcctgcaccgaatgcatggccatggccaccacgtcggcgccctgttcacgggcggccttggccttggcgacggcacggtcgatgtcggactgatgctgggggtcgccggcttcgcgcaggcggtcgacctgccagtcatggtcggcggtcatgccgttgagcgacaccgtgccggtgaccaggccgagcttgccgccgcccgtgggcgagtcgatgaccagcggcttggtggagtcctcctcgttcttgtacgaaccggtctgcgcgatgcccttggacgcgagcgtatcccacaggcgggcgatgccgtcggcaccctgatcccatgaatggttggtggcgtgcgtgcaggcggtgtagccgaccgaggccgcggcatcggcgacctccggcggcacgttgaataccggatagccggtgtagggaccgccgcgtttggcgatcggcgtctcgaactcgcacacggcgatgtcggacgcctggatgtatggcttcatggtttcgaacagcggcgtgaaatcgaacgccgtgccgtcggtggcggcggtgttcgcaccggcgaaatgcttccacaggttcggatggaacagcaggtcgccgttgaccagcatggagatgcagtcggtgtccgggcagtcgggcgaattgccatggtgctccacaaccggttcgggtacggcctgcttgttgtcgagatcgacccgggtcaccgtcgcggccttgtccggtttcgcgacgggagcggcggcctgcatatgccgcacgaccagccatccgccgccgacgagcaccgccacgatgaccagcacgacgacgagcgccctgacgggcgaatgcgatgccgtcgtcctgtgatgcccttttccccggatgtgccccatcgtacgctcctcgctcatctcgtcctgatggttctcagtctaacgcccgtcagctactgtccagtaagcggacacgacacgcgcgggcgaatctcccctacgacacaagcacagacgtgcgacacgcgcgggaaaccggcatatgcaatcacattgcggcggcatctttcttactatgtgaacgatgacatcatcgtgtcacggtaaacgaagggggtagaatgactgcttggagacggacggacaatggcgtacctccgccccccctgcttcgctataagggacggtgcgccttgcccggatggccggtcgcgcggattatgcacgaccggctttctcatatcatgaccacacaaatcccagcgaacattcagcttttcgtggcttaccgattccctaccagtcacacagcatcgacccacgcaccggcggctccagcctgctgccataatacgggctgcaatagtcgttcttgacgtccctcgagaaagacccggaaaaagcaaaaagccccgggcaaacgtccggagcctagtcggcggagacagagggattcgaaccctcgagccgctaaacacgactaacaccttagcagggtgcccctatcggccactcaggcatgtctccatgttgcacattggcgcaacaacatggcatcttaccatcgtcccccggacttcagcaacacggtgtgccgcacgcggcgtcatacggggcctgacggcgggtcaacgcgccggattcgagtcgcccgtgaacgtgacgatccccgcgacgatcagcagcaacgccagcaatttcgcggcgccctgcactccgacaggccaggccacgcgcgggcggcaaagagattgcgacggccgctccccaaccggtacggcaaggcccgctccatcccagcccggcacggtacgataagggatatgagcaccgcacctagactggccgccgccaaacgcgattgggggcatgacgagaccggctgcacggtgctgcacatcgacatggacgccttctacgcctcgctggaagtggcacgtcatcccgaactcaaaggcaagccggtgatcatcggcaccgggacgcgctcggtggtgtcggcggcgagctatgaggcacggcgttacggcgtcaattcggcgatggcgagcgcccgtgcccgtcagctgtgcccggacggcgtgttcctgccggtggacatgcactactaccggatgatgtctcggcgcatcgtcgaagaggtgttcagccaggtcactgaccggttcgagcaggtttcggtggatgaggcgtatatggacgtgtcgggggcgctgctcgcctggcaacggccgacccggatcggcgcctggatacgacaggaggtcgcctcgcggttccatgtgacctgttcggtgggcgtcgccgcgaacaagctggtcgcgaaaatggcgtcgacgaatgcgaagcctgatggcatgctgctgattcccgtcgcccgtcacgccgagttcgtacagatgatgccgctgcggggcatacccggcatcgggccttcgctggagcggcggctggcggagtggggcgtgaagaccgtggccgacctggcgaagatgagcgagcagacgctggccacggccatcggctcgcagaccatggcccacggcctgtatatggccgcgcgtggcatggatgagcgtgcggtgacgccgtacactccggagaagtcgatcggctccgagagcacgttccccgaggacacgcgcgacatgcgacgggtatgcgacctgctgcgccggtgctgcgacgaagtggcgagctcgctacgcagacgcggtctggtggcgcggacggtgacggtgaaactgcggttcgccgatctgagctacaagtcgatgtcacacaccatggaacgcgccgaggacacggccgccgcgctgtatccgcaatccgtagagctactgtgccggatgctggggatcgagggtggcgtcgccgccatgcggagccccggcactcccctgccgcgagacatccggctcgccggcatgagcgcgagcggattggcgaggtcggctggttcgaccgtgcagccgacgttggatgacgtgctggaggagaccgaggcacagtccgccggaaccgtcacgcggtcggcgcggcagcgcgacgcggagcaggcgctggacgcgatacgccgcaaatacggcaagggcgcggcgtcgctgggattgtgagccggtgggtgagccgaccgacgtcagcgcgagagacgcctcgccgcgtcggcgacggcatcgtcactcgcggtggcggagaagcgcaggcattccggcgctccgtagaactccccggggctcgctatgatgccgagcgcggccagatcgtccatgtcgcgccagcagtcgcccgacttcgcccgcacccacacgtacagcgccccctgcggcatgcgggcgtcgtatccggcggaccgcagcgcgccgaccagcgtcttcagacggtggcgatagcgcgtccattgggttttcgccgcatcgaaatcacgcaatcccgcggccatcgcggactgcaccggaccggggatgatctgcccgatctgcttgcggtacaccgacatctcatgcaccaggccggcgtctcccgcgatgaacgcggtccggtatcccgccatgttcgactgcttgctgagcgagtacagcaccaggatccggtctgcggtaccatcgcagacggcggtgttcaacgcgcacggggacgtcgccaacgacaccggcgtcgacgcaccggccccggcaccgtccacgtggaaatcacgcgaattcgacgaccagcacatcagggcatagcactcgtcggacagcaccaccgcgccgatgcgacgcgccgccgcgacgatatcggacagccagccgccggacagcacgccgccggtgggattacacggcgaattgacccataccgccttcacacccggcacatggcaccatgagtcgacatccgagacgtcatcgaccttcagcacgctcgcaccggccagctgcgtgccgatctcgtacgtggggtacgagaccttcggctggaccacgacatcgccctcgccgaggtgcaacagcgaggccatcagcgcgacggcctccttggagccgaccgtgggcacaacgtcggcgttgatggattgcaggtccacgccgcgcacggcacggaaccattcgaagatggcgtcgcgcagatcaccggatccggccgtcaccggataaccgtgcgcgttcttcgcgtccgaggccacggcaagcgcctcacgcacggattgcggcaccgggtcgacgggagagcccaccgacaggtcgacgatgccgcccggcacctgtgccgcctttgtcttgtacggggcgatgcgagaccaatcgtatggcgatgaataagcgtgaaagcccatgctggtcctttcctcgacgtcctccggccggccgtggcgtgtcacccggcgaaggaaccgtgctctatgaaagcggccgccgcacaaggcgacggcctgcagaatgataccgggcggatcagtcctgattctgaggcggcaacgcggccacctgctcgggatcgtggccgatcgggccgtgtgcggaagcaccgccgaaatcaccgacctcggcgaagaaactcaccgcggcatccttgtaccaagcccactcgtcgggcaggtcatcctcgtagaagatggcttcggtcgggcacaccggctcacatgcgccacaatcgacgcactcgttcggattgatgtacagggaacgcgaaccctcgtagatgcaatcgaccgggcactcgtccacacaagccttgtccttgacgtccacgcacggctgggcgataacgtatggcatgactcctccttggcttagcttgacttaccacagtacgcggcaacggggacgcacggtcacgctcccgccttgctccaccccgcgaaagtcccatctaacgcgcacgagatgggactttgggcggctaacgcaggtccatgccgacgacgaccggctcggggacgaggcggacgccgaacgccgcctccacgccgtcctgcacggcatgcgccagcgccgcgatgtcggaggcggccgcatccccgcggttggtcagtgccagcgtgtgcagcgtggacaggccggccggcgaggattcgtcgaccttgaaccccttatggaatcctgcatgatcgatcagccaggcggcggaggtcttcacgcccgccgtgccatccggcagcgtcgcggggaaacgcggggcgtcctgcggcaacctatcggccgcatcggcgggaagcaccggattcatgaagaagctgccgcagctgtgccggtcgggatcgcgcacgacgggcgtgtccgcgcctgcggccagctggcgacgctgcgcttggagcgcgatgcgcacgttgacgtcgcgcttggtgccggccatcgccggctgaagataacgcgcggcatcctccagcatccccttggccgcacggaccttgagcacggcgttgcggatggccgcggtctccatgcggtcaccgacctcgactcccagcgccttggcgagctgtccgtaaccgaccgtgccggtagtgctgtgccgcagcgcgaatgtcaccgacagcaccacgtatcgcggcgtcgggaagaactcgccggccggcaccgccggagcctgatacatgctcgtcttgagagcgctcatacggtatccgaatcccatgtcggcagccgcgatgtccagcgtccgcttgtcccgacggtcccacgcctccacggattcgaccgcgcctgcgacttcctgtccgtacgcgccgatgttctgcaccaccgaggcgccgactgtgccggggatgccggacagaccttccacgccctccagcccgagctcgacggtgaacgcgacgaaatcatcccagttgcagccggcttcggcgttgacgtgcacgattcgctcgccgttctcgaccggcgcggcctcgtcgggcacggtgatctgccggcgggcgtcgcgcacgacgacgccattgaacggcccatcagcgaccagcagattggatccgccgccaatcacgcatagcggcagccctttggagtccgcgtcctccaccgcttcaatcaccccgacgcgcgaggtcggttcgatgaatcgggcgatatggccgccgacgccgatagtggtcagatctgcaaaactcgtcatgccctctagggtacacgcgcccgtcccgcgagcggcggccgtacgacgaccggggcgatgaaacgacaaaagcccgaccggtgaaggtcgggcttttacgacaaagacttgataaagctcagcgggtctcgcggtgcacggtctgcttgccgcaacgcgggcagaacttcttcagctcaagacggtcgggcgtattacgacggttcttcgtcgtgatgtagttacgctccttgcactcagtgcatgccagcgtgatgcccggacggatatcggcgcttttgcttgccatgtggttcacctctgtggtcgttgtttaccggtggcttaccggcctttgtagcgagaaagagactcgaactcttgaccttacgattatgagtcgtacgctctagccagctgagctatcccgccagagagccccgagtgagaattggactcacgacctcttccttaccaaggaagtgctctaccactgagctatcggggcgtggcggatagtggattcgaaccactgaagcacgaagcggctgatttacagtcagctccctttgaccgcttgggaaatccgccatggctgcttgtcgaggctgtggcctcaaccggcaacttggctatctaaacacaagtcgccgacttttgcaactcgcgtgtcgcacacggcatgtcgcaagtatttccaaggtatcacggcatctcaccttcgatactcgcatcatgtttttctgcgcaatgacgccgggaacggccgtctgaacatccgccagaccgcattgccgcgtcgtttcgcggcgacggcgcaccgggcgcacaacccgcgcaacggttccggcgacggcgcgacggacgtcggacgcgccggctgtcacatggtccgcgagttcggccagatacgcgccgaaatcggactccccttccggcgtcacggcttccagacattcggcgatgcgaccggcaataccgcgcttagtgtcgacaggcgaccatctcacgcccgcgtcccatgccgaatcgcacgcctcgcgccacgccgcacgccaagcccaccccatgccgttagtcgcgtccggcgatccggtctctccgaccgcctccatcaggccgaaccgcatccggcatcgacgctggcgcacactcgatgggcgagcaccgggaccaccaccgagcgcacgtcatccgccatcacgaaatcacgaccctgcatcagcgcccgcgcacgggtcatcgccgccacgttgaggctgcctcgcggcgacactccgaaccgcacgccctgcgcgtcacgggtcgccgcggacagcgccacgatatacgacgccatctcaggcgccaacgtcaccctgcggcatgccgcacggatatcacggaccctttcgatcgagcgaatctgccgcagtccgtgggtatgcccgtccacgctgatctgcccctcgcccatggcctccagcatggcggactgcgccttcggattcgcacggttgacctcgtcggcgatgacgatattggcgaacaacggtcccggatggaaatcgaacgaaccggtggcctgcgaatacacgctgacaccggtcagatcgctcggcagcagatgccctcccgcgaccagcgtcattaccgcaagctcaatcacctcgcgggagcacgacagcacaccggcaagtgcgtcgatgatgtcgccgatgaccgccgccgacatggcgggagtgtcgatcgcgatgtcttcgtcagctccgccgttgctttcgatacccgttgcgcgtaccaccccagtcggccccgccgacagtccccgtcagcgggtgcggctattgtgcggcgtcccatacggcgcgggacagttcggtgatctggcttggggccacggctgaggagatgtcgctgctcatcaccgcgagcacatacggatgggtaccgaacacgatcgccacgtcgttctgaacggccgccagctcgccggtcttgttggcgaccttcacaccggacggcacgcccgcgggaatcttggtgcgccgcgtctggccgagcagcagctgcatcatgcgttcgctggcgtttttcgacaccagcgtcccggcgtacacctgagagaggaacgagccgcagtcgcgcgtcgaggtccagttctccaccgcgttgcccgaggccatgccggtcaatgtgcgcagctcctcgctggaggtgaagccgtatcgttgcgcggtcgcggtgacggtggcgatggcggctttgccgtcgccgttgccgatgcgcgacagcagcccgttcgcagcttcgttcgagctgacggtgatcatctgcttcagcagggcgtccacgttcgcgtcatcggtgatggtgtcatgctcgatgccgtcaaacacggccagcatgatgtagagcttgaccagtgacgccgccacgagtttctcgtcgttgactgtgacgtcgcggcctctttccagatcgatgtagggcgccgaccatgtgccgccgtactgcgcgagcttggtatcgagcacctgtttgacggcagcgacacgcgtctcactcgggtcgggttctttcggcgctgcgggcgcgggcacggccgtgacctcccgcgctgatcggcttgccgcaattcggacataccatcatgattgcctgcctcatcggaattcccttgtatcgtcttcccttccgcacagtctaccaaacgagtgcggccagacataggaaaaccccggcgcatatcatgcgatccggggttccgtgctgacggcgctgtcgtgcagcgttcactcagccaagaatggcgagcacgtcacgagaggagacgatcaggtagtcctcgccctcgtagtgcacttcggtgccaccgtacttggagtacagcaccttgtcgccgaccttgacgtccatggggatgcgctcgcccttgtcgtcacgacggccggggccgacggccaggacttcaccctgctgcggcttctccttggcgttgtccgggatgaacagaccggacgcggtctgggtctcggcagcggcctgcttgacgatgatcttgtcttccaacggtgtgagcttgatcgacactgtgggtcacctcgtattcttgaaatccaatcgtatggtcccgcgatggaatgccgccattcagaggctgacgatcacttcgggcatcatcccttcgcgctagcactcatcgtagcgcgattgttagcactctgccaactcgactgctaacgctctgagagaaaatcacacgcaatcacgacgagcggcgcgcaagaatcgcctcaaggccggttcccagcgagtcggaggacgcatccggggcatccacgcttgaccgcacctccgtctgatggaacgcgtcggtatcgttcaccgaggcgtcatccatgaccgcggcgacggtggcatccgcatccgactgccctgcatcgccgccgtccacgatggtgggctgctcggcaaccagtgcaggaacggccttcgcgacctgcttcgtcgatttgatctccaggctctccggcgcgggcgcatggcggtcgacgccattgcgcggctcgcccagcgagaacgaaatcagatcctgagacgcggccacttcgaaggcgtccaaggccgcggccgggtgcacccgatccagttccgtggtcatgtcgccgcccgagggggcgctcccctcctcgacgaccacttcggcatgggagtccgcgggctccacgacattcgtcgcggactcgtccgcggacggctgcgcgacggcatcctgccgcggctcaggctgcacggccgacgttacggccgcttccggctgttccgatgccgcatccacatcatgccggccgttttcggacgcagccatcgcatgggccttctgccgcgcctcacgggcggccaacgcgcgatcctgctcgatacgtgcgcggtgaagcgcctgacgaatctcccggcgttccatcacgtcggtcttcacttcggtctcggcagagggattcgcggtggcggttacctggtcatcggccgtatcagcgattgccttcgccgcagacttgtctggggacgtggactttgcctgagacggggactttgctcgcgggcgggcactcgccccggcccgtttcgccagacgttccctgcgccgcgcctcggccagcgcatgctcccagcgacgggcctgactggaggcccgcacgcccaacgccaacacgaccgccagcagcacgcccggaatcagcgcgaacagggcgctgaaaggcagaaccatcgacagcaccagcaccagcaccgtgatcagcagcagcgatagcgccaatatgcgccgacgacggaccgccgcacgccgaagctcgcgaatatgcgccactttcgccgtggtcggcgtcgtggtgctcgtttgcgcccgctgcataatagcccctttcggctgcggcgtatgctcgtcggagaatcgagtaccgctgtcggcatccaccagatgcaacgacgacgagtacctgtcctgacggtgctcggccacctttttcatgctgttgaccgtccgcctgggcagccagccaaccgcgataaccatcagaatcaccagcaccaccacggtgctcagcgactcataacccatgtccttaagaataggagactccccttacgattgcactgattccggcatggcgtgtcgagctatcagacgatggatgaacccgtcgccggcgtcctcggcgaacaggctgtaggtctcatgatcgcgccactgcccgttgacgaacatgtaccggggccgcacgccctcataatggcaccccactttacacgccaccctgcgggagcgctcgttttccggcagtaatgcgatttccatgcggtgcagccgagggccggtcggatcacagaacgcccagtcggcgagcagcgccaccgccatcggcgcgaagccatgccccgcgtaccgctgatcgacccaatacccgatcacaccggtgcgcatggatcccagatctatcgctcccagcgaaatctggccgacgatatgctcatgataatcgatggcgaacaccactccgcggccggtctgctcgttgtgacgcatctgctgcatccactggttgtaggtcatcggcgagccgtgcatgggatcgcctgactcccatggatgcaaccacgcatcgttgcgccaccgcacctcgttccactcctcttcgtcgtccgccgtgatcggccgcagctttatcgggcattgcggaatgccgatccaccgcggcacgcggatggatggcgctgccggctgccggaacacggcgcatatcgattgcaaaacggacacgcacccattgtgccatcgtcgcgtctccgacacggcgcaccgtccgccgatgacggacattcgtccgtgatagaacgtaaccatgaacctttgccaacgccggcagacgaccgatgccgatatgtcggacgatctgcgcaagagacagctgagacgggacgccatcgcgcggcgtaagaccgtgacgcggcaggaacgggacgcggccgcggcggcactggccgaacacattgtgccgttgctggacttggtcggcgtgcaggccggcacgtctggcgtcatgtccgcgccacacggccgcggacaccggccgccgaccgtggccgcctacgtgtcgatgggcagcgaaatccccatgcggccgctgctgtccctgctgctcgaccgcgggctgcgcgtccttgtgccgcgcttgggctccggtctggacgtgggatgggctctgctgcccgacatggtctcattgcatggcgtgacctgcgagggaaccggcatggcacaacggccggatgagccggatacgcagacgcttggcccggcggcccttggcgatgccgacctgatcatcgtgcccgcgctggccgtggatgcacatggcgtccggcttgggcgcggcggcggctggtatgaccgcgcgctgacataccgacgcggaggcgtgccggtcgtcgccgtctgctggccgtgggaatgcatggcagacgacctgccccgccagtctcacgatatcccggtcgactgggtggtcacgccgcagggagcccgacgcctgtagttcgccatccacgcaagttcgcggagggaacaaaacgagacgtcgagcggcgcggtgtccgcgtgacgactaggatatgaacggacttgatgcgtatgccgggcatcgcatacgtgccggaatcatataatgagcttcgaccagggaggaaccgtgccaacctatcattaccgttgtaagaactgcggatacgatttcaccgagcagcagtcgttcgaggacgacccgatcaccgtgtgcccccagtgcgggcaagagcaggtgcgcaaggtgtattccgccgtgccgatcgagttcaaggggcacggcttctaccgcaccgacgggcgcggcggctccggcaaataagcagctgccattggcgcgttcgccgtcttccggcggccagtgctcggcccgagcatgtgcgacacgcccaagatgtggataactgccgagccttcgaccacattttcgtcacggcttgcgcatcggaacaacgttcagtcaccatgcttgcatggtgactttttctatattggagaagctgaagcgccccacgttgcgccaacgtcggatgctgcggctcacacggcggctgatggcggcctgttgcacggccattgcagcattcgcgacactgcaatgcgtgacggcgagcatcgtcacgcaaccggtcgtggtggcggcacggctcatcccacgcggcgcgcgtatcggcgcggaggacgtggagatccggcagatgcccgtatcggatggttgggatacggcgctcgatgcggcgaatcaggcggcgggaggcatcgcgcagacggacatcgccgccgggcagccgctgttcggcgccatagtttcgcggcggccggtggcggaacccggtcagacggtgatcgatgtacgggtcaccggcacggtggacggcatcgcggccggtgatgtcatggatctggtatccggcaccccttgcgacgcttcggctggtacgacttcatcgcgtgacgaatccgcaggcggccggtcatgcgttctcgcgcgatcggccacggcgatggatgccgcccatgacgatgcgatgaccggcggcacgctcatcacgttcgctttgactcccgacgaagccatatcaatcatcaacgcacaggaactcggtccgattatggccgtcactgcgcaatagctgcggttgctcagccgcagcagccacctccagtctcgctgttcgcgcgacagcccccgctggcgggggctgtcgcgaagcgactggggtggtcaccacactcaacgtttgtcgttgaagatggcccagtggggtggcagttcgccgaggatgcgtttgtcgtcgtcggcctcgcgctgctgctcggtgcgcatatcgcccggttcgagtttcacgccgtctgcatcgaagcgctcggttccgtggaacacgacgcgtttgtgctcgcgccgcgtacgacgcgaggcactgtacggccttggctccgaggcatctgcggccacacgatccccgtcaccagtagtatcgccgctcatcgcacatccccgtagatctcgccgatgcgcgacacgatcgcatcgacctccttgtccgggttgacgaatgcgccgacactccacacgctcatcaccgaccagcccagcgacgcaaggtcctgcatcaggccgcgatgccgttcacgcgtggactgcacgctcatgaactgcgcgtcgtcggtcagcacggccagcgcgaacggcttgtcgggcaacccgacgaccatcggaatgtgcaggccgcggtcgaacccgtagtcgacggcggcgttcagtccgcgggaccgcacgcgctccgccagatcattgaacagcacattgttcgaccgggtgatggtcaccggacgcaccacgtggtcgtccagctgctccacccagcgcagcatggcatgcagcagctgcggtccgggctggtgaagtcgctcatcgtccagatcagactcgtcgaacgccgaaacgatatcgagatggcggtcgcacagcgccagcgcatccagcagcatggcacgtccgccttcgccctccagcacgccgaactgctgcagcagacgcccatgcacggtcttcgcgtagcacaacgacagaatcacgtccgtcgactgggccccggcgatctccggcagcgcgacgatgcgcacgtggcacaggaactgccccatggtcttgttcttcgacgccagcgatttcagttccgcaccaagtcgcgaacggaatgcgtcagtgagcgtgaccacggtcagcgtgtagccgaccggcaccacgttgaaactcgccgcgcgttcggtgatgatgcggacgacctcatcgatctcctgctggctgctctcgaccaatccggtggccatgaccggtgttccgttcgcctcgaccttgtggaaggccacccggccttgcgacggctcggtcgtgacgtcatagcgcacctcgccatacccctgggattccaggaacgcggcgagcctgggcgcgcgccgcacggggtgggagcggaccttcacgctcggcagcagctccatcagcgccttcacgctcggcgaggtcacggtggaccggtgggccagcacggccacttgcttcgcgcggcagacgatggtcagcagctggatggccggaatgtgcgcggccgcgtcgatgattgccacgtcggcgagggtcgtcggatcggtgagcgcggcaagcgtggccggagtcgccacgatgatgggcttggccgcggccaggatctcggggtggtcacggcgtatccggctgagcgggatgcgggtcttgccggccagcaccgtgtgcagctggttggattcctgcgtgcgggagaacagcatttcacacaggcggcgcatggattcctgcgcgaccatcggaccgaccgaacgcacgtgttcggtgtccacctgcgcgaaacgatccgcagcggactgcaacgccgacccatcctgattggagatgatcgcggacgcccgcacgatgttctcgaacaccgtggtccaccatgccagctgcagttcggcatccaccgattccaccggcacacggcgcgtgtgcaggtcctcgaccagttcggtgagcccggccgtctggaattcatgttcgagacggcagcgctccggcagtgtgtccagcgcgagatggtcgtcgaacagcgccttcaggcgttcctcgacggcgacgaaatcctgcgattccagatcgccgccctgcacggtggtggacagtacggcgtccagcgccgtcaggtcgcgggccagctcctcctgcgtggcgatgatgtcgtcgagtttgttcggcagcaccggccacccgccgtgaggcacgaacatgcgccattgcgcggcctgcttggccacgacctgcagcgcatcgtgcaggttctcgacctgtgcgcccacgcgcagcaggctcttggcctccttgatatggcggcgacgctcccagaatccgatagtggtgccttcggccttgcgttcggccttggacttgctcgactcgatcatcgcgtcgatgtcgcgctcgaagatctccggctggaacacgtcgagcacgcggcgcaggttcttcagcacctgcacctgacggccccactcctgcgcggtgttcggtatcgggaacccgcatgtctgcacggtggacgacacctgttcacgggtcaacggcagcaacttgcgcagcagatcgaccacacgctggtagacggtcacagcctcgtcctcggacgtaatggaggccttgaaccaagcggtatcctccggtccgagcgtgaattcgccgagctcgccggcacgcctgagcttcgccgcccattcgtccagatgaccgccgatctcacgcgcggtctccttgcgcaaccgcactcgggtggcgggatgcgcgggcaacgtggcgatttcggcgaggttctgtatggtctggtacgcggacacgccccactgcttgtcggtgcagtgcaggtcacccagataccgggtgagacgggaacgcacgccgaccagctcatcggcgatctggtcgaaccgggagctggcgacgccgggctggaatccgaccgcggcgatcagctgatggtcgatgctgtcattgcagcgctcgtccgagacgtcgagcacttggccgctgagctcattggcgctgatggcctgacggaaacgacgcttctgatcggcgatgcacggcacgtacagtacgctgcggccgttcatcacgcagcgcgacgcgatggcggcggcgtaatcggcggtgtcacgcccgttgacgacatcgactccgagtgaatgcccggctgcgaccatatcggccgcgtaccgcacggcgttgtcgacatcgccgacttcgaactcgttgtgcggatcggcgtcgaatgggctgaacgcaggtgcgccggagtccttgagcgcttcggcggcctccttgctgcccgcgagcgcgtccagcaccgtgttgccggtcgccccctcggccagcgtatcgataatgtgctggctttcggcaagaatcagcgagccgggcgacatgaagcagcccaggataatctgccgctcgatggtgaaatcggggaacaccttctccgcacgcttggtgatcgccgcgaacaccgcggacgtttcgggcgtgccgctctcgtagttggcgccgttgaacagctcccgctcgtcaagttcgacgtgctgctcgcgcatcaccgtcacgaacgcggggttgagccggacatgcccgacgaaccggatcaccgccacatcgccttcatcctgggcgctttgcacggataccggatacagcagcaccggcatggcaccgtcgtcccatgtggcgactcccacggtgagagacagttccgcgacgccgctgacgcgcagtttcgcggccttctcgtcaagcacccgctccagtcggcggttcgccgcacgcagcatgccgttgtcgcggaacagcagatccagcgacgcgcggcctcccgcgaacagctgggcgatgccggagggatgcgcatgggtcaaatcgagcttcgccccaagctggttgatgtcctccaatggggacggcaccaatccggcgcggtactgttcatgccattgacgcatgcgttccagcgattggggcgcctgttgcatgctttcgctcatgacccgactcacttccctaccgctttgcggtaactcttgtagccctcattgttctccagcgcggcgtcaatgtccgctttgccctgatcttccagccaattatagaggtcatcgtacagcaatggattcatggcaaggaacggcagcagctcttcgcaattcgcgatggcgaactgctcggtgtagtcttccgtggtcttcgcctggtcagaggtgtacccgttgacttcgattttcggttcggcggcggcaagcctgcctttcgacacgagttcgaacaccgatcccggctcgaatgcgggtcggaacgaaccggtcgagtccgcctcgtcgtcgttcggctgcgcgaaccggcggtgctcttccggaatctccccgtgggcggtgtccgtatcggctttcacgacgccgtcgcctgccacggcgccggcggtgacttccacaccggccgcgttggctgcgacctcgttcaccgcctgacggatgtcgtcgtgcgcctcctgatcggatgacgcctgctggaatcggtcgtcggacggctgtccgttcgccaactgatccgcctgctctgcgggcgcggtggactgcccggcctcttcgctgtcctcggcgagcgcgtcggcgaacaggtcgcggggtaacgccaccaccggcttagcatcggccacgttcaacggcatggaatcgggctcgctcggctcatcgttggtctgcgattgggccgcggtcactacagaatcagatacagcggaatcagccggtaccgtatccgcggcggactcggatgccacggttccagaagtcacggtttcaggcgatgccgtatcggatgtcgcagtctcagtggatacggccgcgtccgcggcatcaacggcatccgcaggcgccgcattctcggaggactcgacggcttccggaaccttggtctcggcatcgctctcggcagcgtcggcctcagccggtgacacggtttcggccagcaccgcggcctcaacgggcatggcagcatccgacgaaacggcaagctccgaatccggctcagcggcaccggccgcggaatccgccgccaatccatccgccgtggtcgtcttctgcggcgggaacgtctgcgatgcggcggcattcagctcaccgacacgcttgcgcacggtggcagcgctgatcgcggcggtaggttccccggcacgcaggtcaagaatgtcatccaccgacatgtcggccacatccggctcctgcttgacggtctccaaagcgtatccgaacaggtcgggcacgacgaacgtgtcgctcaccggctgctccacacgaatgaaatcgacggggacatcgccgaattgcaggcgcatcggtgaagtcggcagcaggaaatcgacgttcggcggcagacgcatgagatcgccattgccccgcaccacatatgacccgttggtcgagcccagatcgcgcacggtgccgccgccgttctgactcaccgcgaaggtcgcatggcgtttcgacatggaccgcgtgccgtccgctatctccaggcgttcggtgccgtcatcgggcaacggccgcaacggcttgcgcccgatttcgatgctgtctcccggcttcacggttttctgatcgatgccaccgattctcaccgtccactgctgtatcgtccgctgatcgccagtcacgtgccgcccttcctttcacgctcgttcgcatactatgtgccattgtgtcatgtcccgctgtgttttcagggattgatgaccgatgaattgacaacattatcgcattgatgccggtatttcggattgtagcgcacaccggtgcggaacgtgtcaggcgttcacagaagcggtctcggctccggtgcgcggaccgccgcatacgcgcagaccctgcggccgcatgtgcgacagcagggtctgtgaaaagctgcaatgtgcgggtttcactcccgcgatcattacttgagctcgacggtggcgccagcctcttccagctgagccttggccttctcggcgtcttccttcttggccttctccaggatggccttcggagcgccatcaaccatggccttggcgtcagccaggccagcgttggtgatggccttgacagccttgatgacctggatcttcttgtcgccgacagcggtcaggacgacatcgaactcggtcttctcttcctcttcggcggcagcgccggcagccggagcggcaacggcgacggcggccggagcggcagcctcgacgtcgaacttctcttcgaaggccttgacgaactcggagagctcgacgagggtcatttcaccgaaagcttccagcagctcttcgttggtgtacttagccatgatggcttcctttcattctggcggcggccttcagcgattgccgtccgcctgatgtgtgttgttttccgattgtggttcatgcggcaagccgcatgagaatcaagctgccttttcctgcttctcgcgcagagcgtcgatcgtacgcacggccttggtaggcacagcgacgaacaggtacgcggccttggcggtcgtggccttgaggtcgcctgcgaacttggagagcagctgcggacgggacatcatgtccgccagcttggtagcaccctcgccgtcgtagacggtgccgtcggcataaccgcccgagataacgagagccttgttggtcttggcaaagtcacgcagcgtcttcgcagcctcaatgaagtcgcccttcacgaaggtgatggcggtcgggcccttgagcaggtcgtcaagaccctcaatgcccgcttccttggcggcgatgcgcgccagcgtgttcttagccacagtgtaggaagtatcgcggcctagcttttcgcgcagttcggaaacctgcggaacggtaagcccgcggtactcggtcaggtagacagcgtcggcgttacggaactgttccgtaagctgagcgactaccgcttccttttcgggcctcttcatggcgttccttcctagatcggccattgatcctgcgaagtcccgcgcaccctgccagggcaataaaaaagccctgcgcacaggcagagcaacatacaaccgtttccggcgagccgtattacaggcacatatttctcaacctgcgctggcttggcgaaccaaacttcgtgagtgcttgcacactccaaccaacggtctgtggtttacaagtcatatagaatacggccgcgagcggacaccttcaacccgggcgtgtcgcgaccgtccgcccagcacgagcgccactccggtaatgcccgccgacagcatggctatgatggccacgacggcatcggagccgcgcagggcatcccgtttcccgttgccatcggacgaatcgccggcgttcccggcggcggtaccctgcgaggtaaggccgaattccacgccggctcttttcgtggcgccgttctccgtctcgtttgcgatgacccgctcccttccggtggagccgatgatctgcgccgaccggtgcatgacgcctgcgatctgctcggcgaggaaccggtacccgtcgtcgttgaagtgaacgccgtcggcgtcatacagctgccgccggttcgcggtcgccgcgtacaggtcgatggtgttccaacgctcgtcacggatcagcgactcctgtacgggatgtaacctgttcacggagttgacggagacatatttggtaccgggggcgatccggtatgagtgcggtgaactcgcgaaatacacgaccggtcggctggcgagatcccggtacaccctcaccagctccttcgcctcggtcctgtacagtgtctcgttccagtaggcgtccttggaatcgttggtgccgagcatgatgatgacgatatcgggggcgaactccttgctctgccggaattcggccgaatcccaatatgaccagcccgtgccccgcagcagcgtgtcaccagcggcgccgaaattgcgcacgtcatagctgctgccgaggatgcggccgagccacgccggatatgcggtgtcgcctttcttgccgccactggatttggagccgtccgtaaggctgtcgcccacgcatgcgatcttgatgggcgcggctgcgtgcgcttctccctcgcacggcaccataaccgccaataaggtcaacgtcagcacggcgagcgccgcggcgagcagacggaacggcgaattgcgatgaatcacacggttcctcatgtcgcagacctcgctatcccttcacggcgccaagcattatcaacgccacgctgccaataccataagtttctcacggcaatcgtggccataagtgaggatttgccagcgaagacctatgcggctcgcgtcggtccggaatgttgactaaacaggcggcattccatcgcgacacgcccggagtgctcagcaagatcggcatgccgaatttcatgaaacgccgccatggagccgattcccgcaaacgcacgcgacgattgtgctacgcactccgggcgtgtcgtggtcggaggctgcaaataatcggcccgccggacgaaaaatctccgtccgacgggccgaccgccccatgtcgtctcagcgcttggccagtgcgagcgccgcaccggccatgagcgtcagggccgcgacggcgatcggaacgatgccggcaccggtggcgctcagcccgcccttctcgccggtatcgggcttggtctcgtcgcccttgcccggcttgccgggatcgggcttgccgccgtcgtcaggcttgccgtcacccgcgccgggcttgccaccatcacccggtccgggcttgtcaccgtcatccttggccttcagcccgtcgacggccgcattcagacttgcgagcgcagcgtcaatctcggcctgcgtcgcatcaggatcggcggagaccttctcggctgcggcaagcgcatcacgcaccgcccggacggactcatccgtatacccacccagatccttggccttgacctgcgcgatcacggcgttcagctcgtccttgctcaccttgccgggatcgggatccggcgtctcggcgggcttcagcccgtcgatggccgcatcgatggcggcgacgagcgcgtcaacctgcgcctgttgcagggattcgtcggcgtctccggccttcgcggccttcactgcggcatccatcttcgcccacgagtcagccgtgtagtcggccgcattcagcgcctctgcccgcttgattgccgccttcagtccgctgcggtcgatgagaccgttcgcgtattcgacctcgccgagcttgaacttcgcctgcttgatatagcagcggtcggtggtgacgccgccgggccagttctgcgagaattccttgtcccagtgaccgtacgtgtccatgatgaacgtaccgtcgtcgagcaccgctacgcccgcgtagccggtgtcgcccgacttcgcgttgttcgcccagtcctcggccagcaggatgcggtattcgccgtcctcctggttaatgagctggtcgtaggtgccgacccaggccacccagtcgccggcgttccagtcgctgccgccgtcgaaccggttgttgccgttgagatcgtagttgatctcgcggaacgtgaccagcagacggccggaaatcggatcgtaggcaatcttgtgccgttcgcccgccagcgagccgggcagatccatcggcttgctccacgtctcgccctcatcatcggagtagatcagtgtcgccgggttgttgtgcgactggctgcgcgccagaccgatgatccgcttgccgtcgggagaacggaacatgccgatctcgcacatctggtatgcgctttcgatgctgcgccattgcgcaagatacggctccgattcgctccactgctcgtcgccgttctcgtcgaaggtgaggtacgtcctgaaattgacgtacgcgtagttgtggtagacgcccatccatttctggatgtcgttgccgtcggagtccttgagctgcacgagactcgccatggcgacgatggcgtcgttgttggcgttgtcgtacgtgcggttggactgccagtgccggtattcggtccaggtctcaccgttgtcgtcggaatacgatgtgttccatccgtacctgttgccggcggagtcggtaccccagcccgggcaggcggtgatcatcatgatgcgttcggtgccgtcggccaggttgagcacgtacagggtcggcgtctcctgcgaaccggcccacgacgcggggatgtcggtcttgcgcgtccaggtggcgccgtcgtcgtcgctgatcttcatgatcaacggtcccttaccgtgcccttgcgggaacgaggtgatcagacggccgctcttcgtgcggatcatgtcgggctggccgaagtactggttggacgtgtcgagtgacttgtgcacgtccgtgaccttcgtctggtcgagcttgtactgcggcagcgtgttcttgatggtgagttcgcggctcacgttgacggtcaccatgtcggtgaatccacctccccggacggtaatgaccgccgttccgcgggacactccggtaacggtgccggaggcgtcgaccttggcgatggtcgggtcgctcgactcgaacgtgactgtaccatcgccgtcgccgccctgcaggttggcgacgatggtgtacgtcccgccgatgtacatgtcggtctcatgctcggcgaggttgagaccgggcagcagcatgccggccgcgatctcggtgtcggagagcacgcgcttgtagatcttcacctcgtcgatcaggccagtgaagccggggccgccgatcacgtcgatcggggcgacgacatcgtgcgtcttcgtccacgtgttcgtcgcgccgatcttcgtgccgttgacgtacatggtcagtccggctgccttgtcctgagtccacgcgatgtaataccacgtgcccggctggaagtcgtaccggaaggtgagcacgtcgccgctggcggtgccgacgcggaagccggattcgcggtcggcggccatcttgaggtcggccgagtacttgccgtccgcgctcgtcatcacggccgagcggccggtgagttcggcgtcggaacgcacccagtagccgatcgtccacggatccgtcttcgcgatgtcgttgccgccggccagggtcacgcctttgccgtccgtgaccttgagcgccttgccggacttgccgtcaacgtattgcgccgtggcgtcggcggtgccgttgcgggtaccccaggagtcgttggcgttcgagtcgtcgaacgagtagtagtgcagcccctgcgccacgacctgtggcgtcacggtgagggtgatgctcgccgatttcgtcgggtcggccttggacgtggcggtgatcgtggtggagcccacgccggcggcggtcaccacgcccttggcggataccgtggcgacgccggtcttggacgagcgccatgtcacggacgcgttcagcaggttcgccggcttgagtgtcgcggtcagctgcttcgccgtgcccagcatgatctcctggtcgccgccgtcgatggcaacggattccaccgtgctcgtgccttgcgccttgagggatatgtacttgtcggtgagcgtgtcaaggtcacccttgaatccgctcatctcattggcaagctgtgtgacctgcgcgtcggtcagatacgagtgcgaggtcgtcaccgtcgttctgatcttcgcgtacatcgcgtcggcatcggcctgcaacgaggggatctcggtgaccatgagcctgatcttgttcacgtcgcgcacgccctcggcgatgcgctccaggcgcacggacgacttggacaccttgtctccgctcttctcgctcggataaatcaggaacgggtcgccgggctcgaaggcgttgtgcgtggcgtcgttgagcgggtcggccacccatgcgtcgtacgcccagcgcaggaagccgctggtctgctcgcccgcgttgaccaccgaccagtagctttcgaccggggcggacagcgagaagttgccgggctcatgctcggtgcaggagtacagcgtggtgcgaaggccctttgcctcacgcgcctcgatcagccgggtgaagtcggtgggatgggccgccgccgcggtgtcgccgacgttcaggtcggtgacgcgcagcgccaggtcgaacttgttgacgaagccgtccatcgcgccggcggtcttcaacggcacgtcgtggatattccgtatcgagtcgatcaggtcgaacgcgtcggcgctgaagccgcgctcgtcgatgccgatgtacgactcgtcgaaccagcccttgtccatcagatgctcgatgagcttgcgcaggaagtcggtccacacgctcctccagcgctcggatccgaccgtgtatttctcggacttcatcgtcccgttctcccagtacgtgaagttgccgtgccagggcgcgatgctgtatatcacgatcttgtcgccgatgccgagtcccttgttgaacgtcacccacttgtcgaagtcggtgaagtcgtaggtgaacccgcccccgctcttggtccacttcaccatcgacgggtagtggatggcgttggcgctgtaggtctggccggaccatgcgtcctcgttgatggtggttgtgatggcgtggccgccgatggacttgtacagttccatgcttgatctgaggatctgcaggtgctcgtccgagaacggggtgacgccgtagtattccgcggaggaatacgggtactgccacagttccacgtcgaagttcttctcatactctgccggatcaggcagcgtagcggccttcacctcgatggtgtaggtgaatgtgagcggcgtttccatcccgtctgcggtggcggtcagcgtggtggtgtaggtgccggccttggcgtccttcggtatggcgaacgatacccagatgttctgcacctgattggccttcaccgtgatcgggccgctttggtagaggatgtcgttgctttcggagcggttggtctcggtggcggcgggcacctcgcggttcgggtctccgtagccgagatagctgccgttgtatgccttggtggacttgatgaacgtggccgtgacgttgcttttggcgatgacgtcgccgccctgcgacgtcaggtcgcttgcggtgaccgtcaggttcgagacggtggtgccgaccgcggcgagcgagatctcgctgttgaccttgtcgttcttccacgctttcagcgcccggttgttcgtcgtgagggccttcacctcgtcgaaccgcttctgcgtgtattgcgtatcggggtccacgatgccgccggtcaggttcggtgccatcctggcgacggtgacgtcgacggtcttgctgatgccggccgcagtcgaggccacggtgatggcggtggctcccggcgcgaccgcggtgaccgtgccatctgcgccgactgtggcgacactcgtgtcgccgctcgtgtaggtcatgtcatcgatggtcgcgtaatcgggcgccaccgtatacgagatccgcttgctgtcgccaacgcccagcgtcatcgaggtcgtgtcgagtgtgacgccggtgaccacgtacggctgatgggtcacgacgaccttggcgcagtcgatcagcgcgttcgtggaattcgtgtcccgctcgcctgtggccaccgccttgaacacgtgctcaccttcgtcaagcccggtgaacgacgcgattttcgtctcgttgatgttggaggcgttgtacaggctgtacgtgcctttttccgctccgtcaatatagtatttcaccttgcccatgggcctgttcttgcctgcatagacgtcgattgcgctgccgaagaatcggaccgtataccagatgtcctccgccgggaggctgtcggatggcgccttggaccacgtatgcacgtcgttgcccggatcccaggcgttgtcggcgaacgtgaagtagttgccgtcgccggtgatcttggtgtgcgagatggtggtggtctgcatgggctcgacggcctgcgcccgcatccccgcgaaatgggggcccatgaccgtcgccagcatcatggataccgtggcgatcacggcggcggcaggtctccatggagagccacgaccgcgcaaccacatagatattcttcggttcatttatggacatcctttctttcacctttgaaaatcggccaccctattgtgtcccagcctttatctttgccagctgtttctgattgtccagtatgccaatcgcgaccttgcgctcagcatccactcagtctatgtgttatgaaagacaacggcctcgatcttatcaggacacaagcttggcgagatcgttgccgtattcgccgagcctcggcaggtcgacctcgcgcccgttgaacggctcctgctgccatgagctgtaggagcatgtcaccgtgacgtccttgccgcgccggtactggctgtcgagcagctggccgctgatgtagatctcgcaggccacgatctgatcgtcgtctgcggacggatcgccgcccaccgtcaacaccatcgtcgcgacgggtggtacagggcagtccgttctgtcccttacatccatcgtattgccgagagagcaaacacacaagacggcacgatacgaatccggcccccgctggaaaaccaacgggggccgggattcaaggcagggcagatgccattacagcactgccagcaggatgaagttgaggatgaagagcagcgagacaatccagatgatcgggtgaacgctcttggcttccttcttgcaggtcttgacgatgcagtaggtgatgaagccggcggcgatgccgtagctgatcgagtacgcgagcgccatgaacacggcggcgaagaacgccggaatcgcctcggagatgtcgctccactcgatctccttgaggctggaggccatcatgcagccgacgatgaccagcacgccggccgtcgctgcggacggcaccgcggagatcaccggggacaggaagatcgacagcgcaaagcagatggacacgaccacggaggtcaggccggtgcggccgcccgccgcgatgcccgcggaagactcgacgtaggtggtggtgttcgaggtaccgcagatcgcgccgatggaggtggcgatcgagtcggcgaacagggcgcgatccagcttggaggagaagcccttgccgtcctccatgtgcttcatgtcgtcatcggagaagatgccggtgcggcggccggtgccgatgaacgtgccgagcgtgtcgaacgtgtcggacatcgagaacgcgaagatcgtgaccagcacgagcggcagtttggatacgtcggagaacagcgccgggaagccatcggcgctgaagatcacgccgaaggtctgcggcagctgggcgaacgtgtcggagatggacacggagttggacatgctggtcaggcccatcgggatgccgatgatcgcggtgatgacgatggtcagcagcatgccgcccttgagcttgagcacggtgaacacgatggcgaacagcaggccgatcaggaacagccacagggtcggggtgttcagcgtggccagaccaggcgtggcgccggtggccaggcccttgccggcggccttggtgtccttcggggtgaaggtgacgaggttgacgttgagcatgccgacgtaggcgacgaatatgccgatgccgccaccgatggcgttctgcagcatgggcgggatcgcctcgatgatcatcttgcggatcttggtgacggtgatgatgatgttgatgaggccgcacaggaacaccatgcacagtgtctcctgccacgtgaacttcagaccgaagcacaccgtgtaggtgaagaacgcgttgagacccatgccggccgcctgcgcgtacggcacattggcgaacaggcccatgacgagcgtgccgatgatggccgcgatgatcgttgccaggaacacgccgccccacggcatgccggtctggtgcaggatctgcggattgacgacgatgatgtagctcatcgcgaagaacgtggtgaggccggccacgatctccgtggacacggtcgtgccgttctccttcaaatggaagaacttctccatactttctctgcttccttgaatgtgcgaggccatccggcctcggcgagacaaactgctattcgcccggtttcccgaacacgcccaccataacatcttcataagtcatggatgttatggtgtcggacggcctgtggatatatgtggataacccgttctccatccacatatccacagaaatcccgccgtcggtggcgcgcgggcccccgacccgctagcgttgcgcccatgaacgattacgaaccgataccgggcgagccgacagccaccatgttccagtcattggaacagattaggcggcagactctgcaacgctgcaccgccacggtagggcagtccgaccgccagctgctcttcggcatgaccaccgctctggaactgcaaggcgtgccggtgccctcccactgcaatctcgacacggccgcgctgcatgtcacggtgcggacgcgctccggcaggcctcatattcgaccgttgaaatccgtcccggtcattgtccacatctggagccattgcactccgcaatcactcatccacatatcgaatggcgtgcacgcattgcacgtgtttcatgtgtgggcgcagctgtccccatatctttcgacagaggatcttgttgtgctcggagattccattctcacgatgctggtacgcaatggcgcgccggacgcggacaaattgtatctggagttgcagcgtttcataaaagagatgccgccgttccgaggaaaaagcatttgcaggcaagccatgacactggtacgccccaatatacggtctcccgccgaaagctcgctacggctgggcgttcaacgccacggaataccggatggacgatgcaatgtcgtggttcctggaatcacctttcgttcaggagcagccatttcgctggacatcgcatgggtcgagttcaaggtcggagtggaatatgacggcgatcatcatcgaacggataaggtccagtggcgccgagacaacgaaaaaagggaacggttgcgggcccacggctggatattaatcatcgtgaccgctcaaaatctgattgacgagatgtcgattgcggaactggccctgcgtatagcaagacgactcgccgagcgcggagcttcgaggtcatcgcaatcagcctagagggactggcaaggaagcacgggtatcggtatgaccgaagacgataggcgtcgaatcatgctatgaccgggaacaacgcgaacgttctcgggtggagcggagcgtgacaatcaagaatgtcgttgtacaacatctgcaaaatcgcacaacacggcagttgtccagcatcgccgtcgcttcttctattccggagctccccctcacaaacgcgaagaccccgcgcggaggcggggtcttgtggcgatggacgcgcgggcggatgcaacgcatgcgatccgccagcgcgccgccgatcagccgaaacgaccggagatgtagcgctcggcttcggcgttctgggggttgttgaacatcgtggtggtgtccgcgaagtactccaggtggccgggctcgccgacggccttcaggttgaagaaggcggtgtaatcggcgatacgggcggcctgctgcatgttgtgggtcacgatcacgatcgtgtagtcgcccttgagctcgttgatcaggtcctcgacggccaacgtcgagatcgggtcgagcgcggagcacggctcgtccatcagcagcacctgcgggtgcacggccacggcgcgggcgatgcacagacgctgctgctgaccgccggacaggccgatgcccgggttgtcgagacggtccttgacctcttcccacaggttggcgcccttgagcgcccactcgaccaggtcgtcggcgtcggacttggagatgcggcggttgttcaggcgcacgccggcgagcacgttctcacgaatcgtcatcgtggggaacgggttcgggcgctggaacaccatgccgacatcgcggcgcacggcgacggggtccacgtccttggcatacaggttcttgccttcgagctcgacctcacccttgacgtgggcgccggggatgatctcgtgcatgcggtcgagggtgcgcagcaccgtggacttgccgcagccggacggcccgatgaacgcggtgaccttgttgggttcgatgttgatgttgacatcctccacggccaggaagtcgccgtagtagatgttcagatgtttgacgtcaatgcgttgtcccatatgaattcctttattgatgtatatacagtgtacggcggcttaccgttcggacttcacggcgaagacgcgagccacgacacggccgatgaggttgaggatcagcacgatgatgatcagcaccagggcggcggcccaggagcgttccatcgggatcgtggtgacgcaggaggagccggcgttgggcgggcagttggcacgcagcttgctgtattcctggtagacgaacacgggaagcgtggtcatctcgccgctgaacaggttcacgttggtgaacgtcgcgtagcctgcggtcatcagcagcggcgcggtctcgccgatcactcgcgcgatggccaggatgacgccggagacgatgccgggcagggcggtgcgcagcacgatcttgcagatggtgcgctgcttggaaacgcccagcgcgtacgaggcctcacgcaggtcgccgggcacgaccttcagcatctcctcactggtcttgacgacggtcgggatcatcagcagcgaaagcgcgacggagccttcgaagccgctgatggtgccggggccgccgatgagcgagaacatcgagtaggcgaacagaccggcgacgatggacgggatgccgctcatcacgtcgaccagcaggccgatggacttggcgagcttgttgccgcgggccgcgtactcgatcaggtagaccgcgcacatcaggccgaccggcacggagatgaccatggcgcccaaggtgatctccaacgtgccgatgatggcgtgcagcacgccgccgtatccgccggagggcgtctggctgccgccgacgacgccggacatgttgtacgaaaggaagttgaggttcagtcgcttgatgccgttggcgacggtcgtccacagcacggagatcagagggatgcacgcgatgatgaaggcgaggcagatcaggctcttcatgaagacgtccttgcgcttgcgggacgcggcgaaggaacggctggtcttgaaccggtcgaagtcgatgtcgggcagttgcttgtcgttgcgcgcggcgggcgtcttcttcacggcgttcgcgtcgacgctgatggtgctctttacagttgcttcactcatcatgcgctcgctttctcggtgatcttacgggcgacgaagttcacgaggaacgtgataacgaacagcacgaggccggtgccgatcagcacgggcacgccgatgttcgggtcggcttccgggtattgcgccgcgatgttcgccgcgatggtctggctctgggatgcccgcagcagcttgatcgagtacgtcaggccgggggaaagaatcatgaggacggccatggtctcgccgagtgcgcggcccaggccgagcatggatgcggagacgatgccggacttgccgaacggcagcacggccagcttgatcatctcccacttggtggcgcccaggccgatggccgcctcctcctgcagacgcggggtctgcatgaagatgtcgcgcgacaccgaggtgatgatcggcaggatcatgacggccagcacgacggcgaccgtggcgacggttcgcgaggggctgtcggcgaccgacgggtcattgagcgatccatcgaagatgtaggtccacctcaggtacttcgcgaaccagttccacaccggctggatggccggcaccagaatcaggccgccccacaggccgtagatgacggacgggatggcggcgagcaggtcgaccacgtagctcagcgcggtcgccagcttcttgggtgcgtaatgcgagatgaacagggcgatgccgatcgagatgaaaaacgcgatgatcagcgacagcgcggagacaagcaccgtgccgaacaccagcgggcccacgtactgccagaagttgtgcgcgcggttgccggtgaatgattcgatggtggcggtgttcgcggcctgatcgcctccgatcagcggccacgcctgaaacagcaggaacaggaacaccgccgcaagcgcgacgagaatgagaatgccggcagcataggcgatcgtcttgaacacgacatcgccggtcttgcctgtactggccggactgtctgccgctttgtcttgcgaactcacaggttctccttcgtatgcattttcaatggtggcttcacggccgtgtacaaccgacagaagccgcagacacctttcattgtgtcaggtgttctgcggcatccgccatacggtgtgtcagctcacgctgatcacttggtcttgatggcctcgatggacttggtgaccttctcgacgatgttgctcggcagcggggcggagccggcagcggaggaggcggtcttctggccttcgtcgctggtcacgtaggtgagccagctcttgacgaacttggcggtgttggcgtccttgtaggcggggcaggcgatgtcgtaggagaccagcacgatcgggtaggcgcccttggctttggtggcgtggttgatcttcacgaccacgcggttgtcgcccttggcggacgtgtcgatctcggaatcctcgatgaccttggaaccggcgtcagcggagatctcgttgtagttctcgccgaccttgatggccgcggtgcccaggtcgccgacctgggagaagtcggcgtagccgatggtgccgtcggcctgcttgacggcggtgacgacgcccgaggtgcccttggcgctctgctggccggggatgtcaggccagttctcggagagctcatgggtccaggagtcgggggcctggtccttgaagtagctcacgaagttctgcgtggtgccggacttgtcggagcggtgcacgacggtgatctgggtgtcgggcaaggtcaggtccttgttctggttggcgatggccggatcgttccacttgacgatcttgccgtcgaagatcttggcggcggtgtcggcatcgaggttgatgtgcttgccggcgtcggaaacgcccttcaagttgaagatgatggcgatcggggagatgtagaccggcacgtcgaacgcggtggtgccgttggcgcacgccttgtcggaggactgggtgacctcgtcatcggagagggccttgtcggagccggcccacgcggtggcgccgctcaggaaggtggtgacgcccgcgccggaaccggtcgggttgtaggtgacgttcgcgccggagttcgccgccatgtaggcggagatccaggcttcctcggccgcctgctgggaggtggcaccagcgccggagaagctgccggtaatcttctcggtcgaggtggaaccggagttgttgccggcggacgaagtgttgtcgccacaggcggcgagcgacgccagcatcacgatgccggaaaccgccgcgatggaacgaacgaagagattcttacgcattgtttctttcctcttatcaactgtcatagcggctcgtgtcatacgattcagagccgattccttttcatgacagttactagcctatgggctgttcgaggggtcggaagacaaaatcggtaaacagaagatgaatagttgccgaccttgccacgtagttggaatgcgcggtttgcgggatatggttcggcccgcctgcaccgggtggttcaggcgggccgagggcgctttataccgggtgcgggccggtcactgctgcgggctgtcgatcttgtagccgaggccgcgcacggtggtcaggtactggggatgggccggatcctcctcgatcttggagcgcacgcgcttgacgtgcacgtcgagggtcttcgtgtcgccgacgtaatcggagccccagatgcggtcgatgagctggtgtcgggtcatcacgcgccccttgttctgcatgaggtattcgagcagttcgaattccttgagcgggaagaacacgctttcgccgcgcacggtgacctgatgctggccaacctgcatggagatgtcgccgcacaccagcgggatgtcgtcgtcgaccacaccgctggcctcgaccgcgccctgattgcgccgcaggaccgcgcggatgcgcgcgagcagctcgcggaacgagtagggcttggtcacgtaatcgtccgcgccgatctccagaccgacgactttgtcgatctcggcgcttttggcggtgagcatgatgatcggcacgcggctctgctcgcggatgcgccggcacagggccgtgccgtcgatgcccggcagcatcaggtcgagcagcaccaggtcgatgccgcccttggtgaacagctccaggccctcctcaccgctggctgcggcggagacgtcgtagccctcgcgcgtcagctggtacaccaagggctcacgatatgattcctcgtcttccacgatgagaatgcgtgtcatgtttacctttcacacatactgtgttcaatgtccgtaccgtcaccatcgtagcgtgttccggcaccgcccgcattcggctccgaagactacgttgcttttccgcgggtttcacgatgggtggccgacgcgccggggagaccgtggcggcgggtctactcctgcgtcgcggcgtcgccgcctcccggcgcgccgacggtctcgccgggcgcttcgccgtcatccgcccgctcgccgtcatcgtcatccggttcgggggcgaccggcagctcgatggtgaacgtggagccttcgccctcgcgcgaccatacggagatcgtaccgccgcactcctgcacgcaatgcttggtgatggccaggccaagccccgagccgcccgtggcccgcgaccgcgccggatcgacccggtagaaccgttcgaatacgcggtccagcgacgccgaggggatgccgatgccctggtcgatcacgcgaatcgtcatggagcttgggtccttgcacagcgagacgctcacgctgaccgtcgtgtattcgggcgagtagcggatggcgttttcgacgaggttcttcacggccatggtgagggtctcccggtcgaccatgatggcgatgtcgcgctgcgcctcgtcgtccgcggcggcgtcagcgtcgaccggcgcctgctcgccgcgcagcgacagccgtatggcgatgtgcttcgcaccggcctgcaccaggttctcgccgacggccgcgcgcaccaccgacatggcggatatgcgctgcgccttgagcatcgccggcgcgtcctgcgcgcgctgcagttcgatcaggtgggtcaccagttcggtcagccgcgcggactccttggtgatgcggccggcgaaataccgcacggcgccagggtcatccgccgcgtcggagacggtttcggcgagcagcgagatcgcgcctgcgggggtcttcagctcgtgggagacattggtgacgaagtcgcggcgcatccgctcgaaccgacgctgctcggtcacgtcgttgatgaacaccgcgtacagaccgtcgcagatatggccgacgcgtacgcgcaggtagctgtcggagggcgcggagctgccggcggtgacacctcgtccggaaatcgcgctcgacatgcgggtcaggtcgagcgagacgcacatctcgcgttcccgcacgcccccgttctccaccacgacgtgcaggatgtcgaggatctcgtccttgacgatccagccgttctcgatgacatcgacgttcacctggcttttgctggagcaccgcacggaaccgttgccgtcgcagacgatcacctcggacggcatgacgtcgatgagcccctgttccgcctcgcgcaccggcacgtcggtgccgaacagcgagccggaatcgctcccctgtcccgccagcgtgtcgcgttcgccggactcgcgccccagcgcgtacgacctcgatacggcaatcaccaacacgataatcgtcaccagcaccgccaacgccacatgcacccatgtcatcggacccgtcccgcctttcctcggccctgcaccgctctcatccacccgcaccgatgatgcggatgcggatggtttcagcgtaacggctccgcacgtcccgccgccagcgcgactacgtaagtttgccagttgttcaacttgccgtgtccttccgcggcgcagcacgtcggagcgagccgcgcccggcgtcacatgcgccgcaggatgtcgagcacgatgcgggccgcggtatccgcgtattcggagatgtcgaagcccttgaactcctcgtagtcggtgtcggcgttgtcgctcagcgcgcggatcaccagcgcgggtacttcgtttcgggcggcgacgtgtgccacggatgcgccttccatctcgacggcgtcggcgccggtgtcgtggatgaccttggcgatctgcgccggcgtatcgacgaagtagttgccggacgcgatgatgccgatgatgtgcgtgacgcccatggccgagagcgcctggtcggcgagggacagcagacggtcgtcggagtggaattcctcgacgggctgctgctcggtgccgggcttccattggccgacgagtcgcatgtcggtgtcgaggtagcgcagtgtgccgccgagcaccacgtcgttgatgtgcaggttccggttgaggttgccggcgatgccggagaagatcaccgcgtcgggatggtatgcgtcgatcaggtgctgggtggtggcggcggcgttgaccagtcccatgccaccgacggtcgcgacggcggtgacggtgcctccgtcgttggttcccagcgtgccgcgcgtcacgtcgaggccggcttggcggtcgtgggtgacgtcgttcagtgatgcggcgatgagtgcgacttcgtcgtccaatgcgccgatgatggcgatggtggtcatgggaatcctttccgtgtggttgttcgtgaagagtgatggacgccgtttcagcgccagcgccgggcggacaccgcgtcggcgagctcgtgcagcagccgttccgtctcgtcccagccgatgcagcggtcggtgatcgacttgccgtagaccagttggtcgagcggggccgccggctggttgccgctttcgatgaagctttccatcatgatgccggtgatgccttcctcgccatcggctatgcgccgggcgatgtctcgcacgacctctgcctgccggtgctcgtccttgccggagttgccgtgcgagcagtcgatgatgagcccgtgggtggcggcggattccgccggcatcatcgcgcgcacgtcgtccatcgcacggcgcacggatgcggtgtcgtagttcggcccgtggatcgagccgcgcagcaccacgtggcagtccgggttgccgagcgtctccaccgcgcaggcccggcccatgtggtcgatgccgaagaacgtgtgctgctgcgcggaggcgtagcagccgttgacggcggccttgacggacccgtcggtcgcgttcttgaatccgatcggcatcgacatgccgctggcgagctggcggtggacctgtgattcggtgttgcgggcgccgatcgcgccccagctgaccgcgtcggagatgaactgggggctggtgggctccaggaattccgtggcggcggcgagtccttcgcccagcacgccgatcagcgtcttgcgcgcgagcagcaggcccttgcggatgttgtggctgccgtcgatgtcggggtcgttgatcagccccttccagccaaccgtcgttcgcggcttctcgaagtacacgcgcatcacgatgagcagttcgccttcggtctccttcatcaccttcgacagccggtgcgcgtagtcgagcgcggcgttcgggtcgtgcaccgagcaggggccgacgatgacgagcagacggtcgtcctgcccatacaggcaggcgcgtatctcgtcgcgcgagtaggcgacgatctcctgcgcggcggagtcaagaggcagttccgccaacacctgggccggggtgggcagcggttcgagctccagcacacggcggttgatgatacggctgacgcccacctgatcctcccagcgcggcacgcccgtggcgagcagcgggttcttgccctcgtccatggcctgccggatggcccgcagctcctccggcgtgttcagcggcttcgggccggcgtgacgcggcgtgccctgcggcgtacgctctcccatgttctgctgctgcatgacgtgatgtctccttgccttgttctctcccccaaggataaggcacggccctgtacttggccatacacgggccgcgccagcccgtatccgccgcgcatgacgaacgtccccatgccccgcgtcgaacgggcacggggacattacgatgttctggagcgctgccgtctcgccggccgcggcgtccttgtagtcgccggccgcgatcgcgaccaccgacaacaccgccaggatcgtcttccagggagttttgcgccctgagtgccgtgccgattccgccatcacgcgccctccttcaccgacgcgaacaacgtcacgccttcgcccacagttgccgtgcattcatcatgatgagccatgccctttcagtcttctctgacttgcgccacgctgcggtcgcgcactaatacccccctgcccgcgctggcacctatgccaacacgcgccggtatccgcggtgtttctcgaaggagaggaaccaccgcttgaactcttatgcgagcctaacatgaaacgggggaaaacgggggcgcttgatttatacaagagttgttgtacaatatttcttgtcaattggatatcgcttcataacatgagcgcagcatcacacgcgacaggtgtcatgaggcacggaaggaacggacatggcacaggcttccgacacggcgcaaccgcagacgccgccccgccgcgacaaccccgcgacagtcaccgacacgaaccgcctgaaggcgctgtcgcaccccacacgactgcgcatactgaccgtgatgagcgacaccaaacccgtcacggtcggccagatcgccgaacagctcggcgaatcggccggaacggtcagctatcacctgaaacagctcgaaaaggccggattcgtcacgcaaacgccatcacccgacggagacaaccgcagaagctgctggctggccgcccaacgcagactggaaatcaacgcggacgcggccgtcgattcggcaatggcgacgacaatggatcaggtcagctccacgcttcggcaagaggcatggcagcgatacaggtcggcctctgacaacctgcccaaacagtggacggacccaacggtgacgagcagcagcgtgctgcggctgacaagcgaggaatacgcgcgcatgtcacaggagttgcgcgagctcttcaacacatggacatcacgcgacctcgcacacgaggaaggggacggctcgcaacccgtcatgctcaacatcgacgccttcagatggctgccataacggcggcctgacataccctctcaccccacgccctgcgcccacaatgcaatgggcgagcgcaagcatacgcaatttcacccctcgacgcacaacacccctcaacttattcaaaggaaacatcatgcccgaatcatcgcaggcgcaaaccgcgccacaccgcgaacgcacttccccgcaacgcagtgaatcgctgtggggcaaccccacatatcgtcaatggttcactgcagacaccgcctcgacgatcggagccgcgatgagaggcttcgcgatctcgctgatcgccttctcgctcacccaatcggtggtgctcgccggatggctcgccacgttcagccaaattgccacgcatgtcagcgacgtgttcggcggcacggtcgtggaccggcacaaccgcaaagggctcatcatcgccaacgccgtgttcggcacgctgctgtggggaacggtgttcgtgctgatcgccctgcatgcgatcgcattcccgatattcgccatcgtgacggtcgcggcgtcagcggtcaacggactactcgccaacgcgaccaacgcgatgctgcgcacgatcatcccgacccgcgaatatccgaaggcgcaaagcctcaatcaggggcgcgattccgtggtcagcatcgcgggatccccgctcggcggcgtgctgtacgcggtcgcgccgtggctgccgttcgcggtcgcctcgctgatgtacgcgatcagcggtgtcagtgccgcccagctgcgcgtcgacgaacatgtccgcgacatggtgacgacagatcgcaagagcaagcgtcccgacaccgcgtcgcaagcgggctgcacgtccgataccgccgtcgcgcccgacgccgatgcgacagcagagtcggcgcacacctcgttcttcgaggatttcatcgaaggatggcgctggacgctgcgcaggcacacgctgatggcgatctgcgtaatcgccgcgctggtgaatttcgggctcaacggcgtgttcgccgcggtgaacctgcaactggtgagcacccacgtggactccgtgcgactcggtttcgtcaacaccgtcatgggagtcggcatgctgatcggcgcggtgatcgccgcacgggtatgcgagcgagtgcacatgggcaccggtctggtcgtcctgtcggtgacgtcgctgctgacattgctgccgatgctgttcagcaacgattacctggtgatactggcgtcatcgctgatcgtcgggctgcccatccccaccatcaactcgctgctgatgggattcgtgtttgccaaagtgccgagcgagatgcagggacgtgtcgagtcggcgagcggcatgctgtcgatgatacccacgctgttctgctcagcgctcgccggctccctgctgccacgcatcgggttcggcgccacgattggcctgttcctggccgtgcttgcggtcaatgtggtcatcgcgctgctgatgccgtcgatccgctcgctccccgccgccgaccactgggacgacgcgtcgctgtgacgatgcatcactgaagcagccccaatgcaaaagaaaacggttcggcgcggcctctcgaacagacaaggccacgccgaacctacgtatatgctaacagccatgtattgtggcataccccacctagcagcctaggccgggcaccggatcagagcgcgcgacgcgcgtcgatggcgtcggcgagcgtgtgcagcagctcctcggtgcgctcccacggcacgcaggagtcggtgaccgactggccatacaccagctggtcgagcggtgccggtttctgatgcccgcccttgaggaagctctccatcatgacgccgaggatgcccggctctccatcggcgatacgtgaggcgatgttctcaatgacctcggcctcgacgttctcgtccttgccacaattgccgtgcgccgcatcgatgaccagaccgcgttcgctcgggccgctcgccttcgacgcgcgcaacgcctcaagcgcggccgccacggaagccgcatcgtagttcgggccggtgttcgacccgcgcaggatcagatggcagtccgggttgcccttcgtctcggcggagatcacgcggccatccaggttgatcgacaggaaatggtgctcgaacccggccgcgaaacacgagtcggcggccggcttgaccgaaccgtcggtcgcgttcttgaagccgatcggcatcgacatgccgctcgccagctcacgatgcacctgcgactccgtgttgcgcgcgccgatcgccccccagctgatcagatcgcagatgtactgcggtgtaatcggatccagccattcggtcgccgtcggcagccccaggccaagcacgtcggtcagcaccttgcgcgccagccacatgcccttgcggatatcgaagcggccatccagatccggatcgttgatcagacccttccagccgatcgtcgtgcgcggcttctcgaaatacacgcgcatcacgatcatcagtcggtcctcaagctcgcccttgagcgccgcaagacgctgcgcgtactcatgcgccgctttcggatcgtgaatcgagcacgggccgacgatgaccagcagacgatcatcgcgaccgtgcaggatgtcgcggatctcctgacgtgattgcagcaccaggtcgctcatatcatcggtgagcggcagttccctgagaaaataccgcggtgccggaatcgggtcgagctggcgaatgttcacgtccaccgtttcagggaacacggcattcccgcccaaatgccgctcgtcctcggaactgtccggaccacgaagccctgccatcgctctgctctccttccgcaccgcaggccggcgtctttcgacccgcgccctcacgtcgcataccaataccgaacacacaatagtagatgccgtcggaatacggaaaacaacggctgcaatgcgggcacggcggagctgcgaagccgtcacccggcgaaagtcccattccggcggctgcggatgggactttcgcgggatggagatggggcactattcgcaggcgacgccgtcgccgtcgcgatcgagtttggccgagtagccgggctgccctttgtatagcggagctttgccggctgcacgcaccgcggcgcagttcttgtagtagacatcggaactgtcgccgtcaggcggagcggccggctccaccaccgtgctcgactcggactgttcgcccgatgaaccgtcctgcgatgagctgccttgcgacacgtcctcctgcggcgccactgattccgcgccgtcgccggtcggaacggtctgggccgggcaggacgacagcacgcgcgacatcgcatcatgctcggcctgcgtcacccacagcgagtacttcgccttcacgccgatctgccgagccacgtatgagcagcggaacgatttgttggcgggcagccaggtcgccgcgtcgccgtcggacttgcgctggttcgacgggccgtccaccgcgagcaggttgtacgggtcattcgccagctgcttgcgccggtcggcgatcagctgctgcgcgcccttctgccatgcgtccgacagcgccaccacatgatcgatctgcacggccgccgaggtgctttgcccgcgcacgaaatcaatcaccgcggcggtgtacgggtcgacgagccgaccgctggtcaccacgcaattgtgcgtaccggccttgtaagtcttgttggtgaggtcacggttgaggatgtcgttgcgcgtgtcgcacccgttgtggtcgacgtcggcccatgccgcgccgaactggtcgcgcgaataaccggttttcggtgcacgtcccttgaccggcagcgtctccagcacgctcgtggcgagctgtccgccggacgcggaagccgagcttgacggtttggacgactcagccgattcggattgtccggacgactgacgctcagccgaccccgcatcggagccgggagttccgcatgcgccgacggtcaacacgaacgcgatcgggataagacacgtcagtattcgattgaatgtattgaatgatgtgcggcttccgaccaacgctttcttcatcatgcagctttctctgggcttattccgctatgccgcaaccgatgcgcggtcctctggctagaaacatcattgtcatccaacaatagcggaagaccgccgtcaatgacgattccccacatcgaacggcacattcctttcgtaaaatgtccatccgacacggggaatcgacgaaatcggtcattcagtctcgtgctcgacgcacgggccgatacctcgctcaggccagcgcacccatcggatcccatgcggggagcatggtggcgggctcggcgagcgcggcctgatactcggccgggagcatcgccttgggcacggccacctcgtacacgtactcggtgaaccagtcgtcgctcatcgtgaagtagcccttgtcggcaatcttgtcgccccaggagttctccacgcgccagcgacgggtcgtggtaccgtcatcggccacgtccacgccgacgaacgccatcgcatggttcatcgcggagtcgccgaagcgtacgcgcgactccttgtccatgtcgaagtccacatcgtagacgctgccgtactcgaacaggtcagtcgcccacgcgccgcgctcgcgatccatgaacggaccgcagtccgcgccgaaccacaccgggatgcccttttcggtcaggatcgcgcgtacgcaatccttcatgaactggttcggcacgttcaggtactcggtcgggttgccgccggccacgttgcccaggtgctcgatgccgatcttcttgcccttggcgtgctcgcggcgcggatcgtccacgaggcacacgtaatcctcaaggtcggcggtgcccacgtacttcttccagaactcgacgggcgtgatttcgccgtcgcggtggaacatgccctcggagtcggtccactcccagtcgaagctcttcggcggctcgcccaggtgaatcgtcaggatgcggtggccggcggcgacggtcttggcgacctcgtcgtcgatcgacgcggggtcggcgtacatgtgcgccacggcagtgtgcagcaggtggcgcagctgcgtgttcatagcgcccgtgttcttcgaggattcggtctccgggaacaggtccttcggcacggcaccgtacttcttatacacgttcagcgccatcgtccactgacctccgtcacccatcacgtcggcgagcaggtgctggatcaggcgcgagtcggacggctctccggcacgaaccagcgcggcgacgtcctgcaggaagtagttgacacgctccagcttgtcgaagtacatcgcgtagttctgggagaactcgaactccttgacgccgaggttcttcttggcgacgaaacgggccacattcagcgagctgaacagccagcagcgaccggaacggtcctgatgggtgacctcgccgttgtcgacggtgacggagaagcggcgctgcagcagacgggaacggtcatagttcagcgcgaccttgtcgataccggcggcggtgacggcgttcatggccagacggttggactggctagcatcgaatgatgcgaccagatcattcagctgctcgccggacagcggtgtgatttcagacgatgacgtgttctcggtcatgctgctcctttgacttgggacgtgcgcggccggttttgtggccgcaatgaaacgtggcatccagcgtttgaccggatgccacgacgggtctctaatgagtgtagcggcgacagcggattcccgccatcgaaccggttcaataccttgattcggcaggagtccggcgacttctgcagccgcctgcgggccggacggcgaagcccggcatccgacgcttcgggatcccggccgactgctattcggcggtttcggcctcgccggcctcggtgtgctcggccacatgctcggcgaccggctcggcggcgaccgcttccgcatcctgattgtcggtatgctccgcgacggcatgcgactcatacgccggtgccggctcatcctgcgcggcggcattgtacagcggcacatcgggcgctccctgatgcgacgcggcgccaggctgctccgccccctgctcgttcatgaacccgaatccgctgaacgccttggtaaacatcgaacgcagctcggacacgcgctgcgtgatggccgcctcacgcgattgcagctcggcgatgcgcccctgaagatcctccagctcgacctgcgcggccttgcggcgatcctcgatctgcgacgccgcatcctcgccggccttttccaggatctgcgcggcctgatcgtcggcctccttgcgcttgctcgccgcatacgtgtcggcatcctcgcgcacggtcttcgcctggccgatcagctcgtcggattccttcttggcggccacgcgacgctcttcgaggttttcgagcagttcgctcaccttcttggtcgcttcgtcctgctgggcggcgatgtcagtgcgaatctgctcgacctcggcgttgacctggctcatcgtctgcgtgtggcggacctcggcgtcgtcgcgaatctcctgcgccttcgccttggccgcatcgataatctcgcccgccctgcgctgcgcgtcggccatcatcttggacacctgctcgcgcacgtcggacagtttcttgttcgcctccgcgagcgccgcctgaatctggtcgttggactcggacttgagcttggcaatctcctcgttcgcgctcctgcgctgcgaggcgatctgctgggtcgccttcgcctgcatctcggcgatctcacgctcctgcttggcgcgctccgacgccatgcgcttttcatgctcctcgcgcgaattggtgagttcgagatcgacggactgacgctgctcggtcacgatcttcgccgtttcggcgcgcagctgggcggcgtcctgctgcgcgctggtcgtaatggtctgcgcctgattggtggcgttgccggtaatcgtatcggccttggcctgagcgtcatcgagaagatgctgcgcatccagcttcgcgttgttgatcagcgtctccgcctgagccttggcggacgcgcgagtcgaggcggcatcctgcttggcacgctccagcagctcggtgctggtctgctccgcggaggcaagcatctgctgggcgttggcgcccaacgaggcgaacgtgtggttcttggacgactgacggttgcgctcctcctgcagcttcgcctgcaactgcagcagacgatccccatcctgcttgatctgcgcacgcaacgcggccagcgtctgttgcgcgctggcaaacgcccggtccacctgctccttatcgtatccacgtatcacaatcgggaactggtccgccatgttcggttcctttcgccattacacctgctcgttagcacaaccacacacgactgtactgcatggcgtcaagcccacgccagaaacgcgacgaaccatacacgaacgtacacacatgccagcaagaaaccagctgcatcccagcaaaacgtcaggcgatgagaatatccccggacgacggctgcagataataacggaccgtctcgcgcaccacatcgcgcccagcacgcacctgctggcgcagatccaggccgttctgcagcctgctgccgccattgatcggagggaagctgacgaagccggccagcacacgatcctgtgtcgccgtccagtgcagcagctggtagaacagcgaattgcatacgaacgtgcccgcgtcggaactgagcgtggcgggtatgccgtcgcgcgcgaaatcgttgatgatggcccgcaacggcaaacgggtccaatatgcggccgggccgtccttgatgatcggctcgaaccgcggcagcgcgttgtcggcgtcggggcgggcagcgttcatcaggttcgtggcgcagcgttccatcgccacgctgtgcgccgcatgcttgagaccggtcgcgatcacgatgtccggccgggtcgcatccaaggtctccagcaacgtgggccaagcgttggcgaagctgaccgggagcgccacggtgttgatggacacgttggcgtcatgcagcggatcgtccacgtcggacggctccccgatgccgtcgcggacgagcgcctcgggcacttcgtacgacgggttgacgtcgatgttctcgtagtggtcgaacccacaaatcacgacattgagctgctgcatgatgccagtgtaccccgcgaacgcctgccgctgctattgctcgcggacctgggcgaacacctgatgcatccgttcgcgtgcgagacgcttgcggatctccagcgagatctgctcggcctggggcaggtcgtcgcgcgtggtgatcttcatgttggtccgggagccggccacgatggcgaccgggacgtcgggcaggtagtcgacgaccacgcgcgtatcatcggtcggatggaaatcggggtcgcgcgaggctagctcgtatgcgcggcggatggtctcgaaccggaatgcctgcggagtctgcgcccggaacatgttcgcgcggtccgggacggagcgcacgaccttgcggtcgcccagatcctcggtgagcagcatcgtgtcggtggaggcgaatgcgactgtggctgcctcgaactcgtccagcgcggtgatgcagccgtcgatcgaggactgctcgacgaacggacgcaccgcgtcgtggatcagcagtttcgcgcggggcgggatgccagctgcccccagcgcctgcagagccgccgcagtgctgtcggcgcgttcggcgccgccgtcaatgatcatgcgcaccttcgggtagccggcctcatcgaccaggcgttccacttcatcgcgcacctgcgggttgacgacgacgatggtgtcggtgacatgcgggttctgctcgaacgcctcgatggaccagcagacgatcggcttgtcgtcgacgctcaccagctgcttggggttgtccggatcgaagcgcgtgccgaagccggcggccaataccacggcgacgaccggtgcttcgggttctctgtcatctctctgagtcataccgcccaccgtatgccccgccctgaccggttgtgacggaagccacactcttctgcacggaattttttctgattcgacgacgaacaggccgccgacaccagtgtcggccccgccgcaacgggctatctcgctttcgaggggttgatttcggctccgccgaacatctatctgcgtttcaaggggttgccaaaacacgataccgcgagtattaagcgccaaacgccattggaatcatgcggtttagggccttgggctacttggccatcaacctcacgaaacgaagatagatgttcccgaccggtggaatcaacctcacgaaacgaagatagcggcccgattcgtcacaaccgaggcaaatcggggtcagccgcgcatgatcagggcgagcaggcgtccctcgtgcgccttgccggcgagcgaggcgcggcggtgggagtaccacagcgggttctccagcgtgcacatgctgtggcgcacggtgctccagcggtcggcgagcgcaggctcgccttcgccgtcggcggcgcacagcgaggcaagctcttcgtcttcatacaggtattgggaggcggcgttgacgcgcgggcgcgagtcgacgatgctgtcggcgggaacacccgccttggcgagctccatgcgggcggccttggcgatgtcgatgccggggcctccgaatcgcgtcagagtgaacgtaccggggaattgcgcgtcgaactcgccggcgatggcgtcgccgacctcgtagcagtcgccgcagatgcacggtccgagcgtggccgcgatgcgctccggcgcagcgcccttggccaccatcgcatcaatcgtggcaccgatgatgccgcgctgcaggcccttgcgcccgcagtgagcggcgccgatcacgccggcctgggcgtcggccatcagcaccggcaggcaatccgcagcgaacatgcccagcgccacacccgcgcgatacgtgacttgcccgtccgcctccacgacggtcgcggcctgcgcctcgccgtcggcggtcacctcaccgggcgtgccggacacatcgaagccgaacggggtgttcagatgccatgatgcatccacgtccaccgcacgcccggaatgcacctgactgaccagcgagagcccgcagccgacggatttcgcgagcgacacgcgattggcgagaatcgcctgcaggtcgtcgccgcccttgccgccgagattgcaatcgccgaaatcgccgtggctcaccccgcccaggcgcgtggtgtagacgacagtgacaccaggcgccagcgcgatcgggatcgtcactggaaccgggttgccctcctcgtcggtggggctgatggcgttgctgtccagaatctcatcatcaaactgcgtatcgctcatgattccttatcctatgtgattgcatgctcttcggctcggcgattggcgtcaggcggctttgagggtggggtgcttggtgcgggagcggatcgcggcgttgaccggcacctcatgcgggcacggcatggagaacacgtgcgccggattgttgatggcttgcacccagttgccgtcggcgtcgcgaaggccgttttcgggcacggtgtagatgagcggcgcatcgcccggcagcaggaattcgatctcctggccgggttcgatcttgttgcggctcatcagcgtgacgcgaccgccttcgtccgggctccacgacagcacttcgccgacgaccagccatgagcggaagtagccgctgcggttggtgttctcggtgaccttgcggtccgggtagtagaagccggtggagtattcgcggtgagcgaccttgtagggttcctctttcaaccattcgggcagtgtgacgggcggcgcgggcgcgacggccgcatgctgccagccgttcgtgtcgatcggggactcgtcgcgcgtgttcgatttgcggcgcgtgctgcgggcctgttgttcaagatcggagatacggtctggggcggtggggctctggccgacttccaggacgccgtcgtcgacggggacgccggcgaaggcgacgtcggcctgttccatgatgtggtccgtgagatcagcaccggacagttccgccgcgtacgggtcatcgttcagccagacgggggcgggcgcgtcggtgcgaatcacgcggtcgtggaacgggcgcagcgtgttgccgtccgcggcctcgaaaccgcgctgcaccatgtattcgttgacggcggtcttgtaggcgttggtcatcgcggcgatgtagtacgcgcttttggcccggccctcgatcttgaggctggtggcgccggagtcgatcaggtcatccaggtgctccatcatgcacatgtcctgcgagttgaacaggtacgtgccctctttggtctcctcgaccgggaagtactggccgggacgcttctcctcgaccagcgagtacttccagcggcacggctgcgcgcattcgccgtggttgccgtcgcgaccggtcagatagttggagatcaggcagcgtccggagaacgccatgcacatcgacccgtgcacgaagcattcgacatccatgtcgtcgggaatgttggcgcggatgtctcgcacggcctgcagatccatctcgcgggcgagcacgacgcgtctggcgccgaggtcgtacagcgcgttggcggcaccgtagttcgtgacacccgcctgcgtggagacgtgcagttccagctcgggggcgacgctatgcgcggtcatgagcacgccgatgtcggtgacgatcagcgcatccacaccggtgccggccagctggctgatgtattcctggatggccctgacctcgttgttgcgcggcaacacattgcaggtcacatatacgcgggcgccccgcgcatgggcgtagcgggcgccctcttcgaagtcctccaggctcaggttcttcggagcacttctcatgccgaacgccttgccgccgcaatatacggcgtcggccccgtaatcgaccgcagccttcagcccgcgcaggttgcccgccggagccagcacttccggcttacgccgggccattcgttgttgagattcaagcaccccaccagtgtagtgcatggaatctggtgccaatgtcgcgcctctgacatcaggcgtcaagtacccccccctaacaaaatccgctcccggcgagttctagtgatcgttgcaacacctggcctaccgcagggaggatcaggtgaccgcgagccaccatgacgacgggacagggacctgccgctgggtgttccaggggcacggttatccgacgaggaaggcgatgtgcgaggccaggcgggccgagtacgtgcgcctgctggccgaggagggcgtgaacttcacccaggccgcccatgcggtcggggtgtcgaaacgcaccggcaaggcctggaggaacggacgcgcccgggccaccggcaggaacgagagaccatcggtggactggtatcgttccaccatggacaagcccaggaagatacacgcccgctatctgggccaggaggaacgcatcctgatcgccgaccggctgcgcctgggcgacggcatacgcgccatcgcccgcctccttgaccggaacccggccaccgtgagccgcgagatacgacgcaacacgaaccccctgaccggatgctacgagccgtaccacgcccagcaatcgagcgccgaccggctcaaacgccccaggcccaggaaagccgggccgggcacgcgcctgtggcgggagatactcgccggccttggacggcattggagtcccgagcagatcggcaaccggctcaggcatgacttccccgataatgaggacatgcacgcaagcgtcgagacgatctaccaggccatctacgtccagggcaagggcgagctgaaacgggccatgcgccagggccgcgcccaacgcaaaccccgtggcggcgcgggtcgcagaccccggttccgggatcccatggtcatgatctcggaccggcccgccgaggtcgaggaccgggccgtccccggccattgggagggtgatctgatcaccggttcggcgaacaggagcgccatcggcaccctggtcgaacgcgccaccaggttcacgatcctgctgcacctgcccgacgggcacgacgcaggccaggtccagcaggccatcgtccgcaagatgcggaacctgcccaggctcctgcgcaactcgctgacctgggaccagggttcggaactcgccctgcacaagcagatcggcgcgagcctggacatgcgggtctatttctgcgacccgcactccccgtggcagcgcggcaccaacgagaacaccaacggcctgttgcgccaatacttccccaagggcaccgacctatccaaataccccgaggactacctcgacgcggtcgccgaggaactcaacgaccggccacgcaagaccctcggctacatgaaaccaagcgagaaaatcctcgaactgctcgacgccgcgtgatagcctcaacaaccgacaacgtggccatggaaggccgctcaaacctcaggtgctgcaaccaccactagaatccacctcatgcaacgcatgactggggtggccatgccctggagtcgcaagactccagtgagactacaaaagcagactctcaaaactcgcggatagacaaggaaaaccgctattccaccggtgtatctgcgagttttgagagcctgtcgccttaaagcctcacaagctcgtcgggggtgagctccaaatcgccggcatgcaggctgtcgaggatggtctcggggcgatgggcgccggggatgacgaagacatggtcgcccttggcgagctcccacgcgagcacgacctgctggtaggagacgccacgagccgccgcgatctcgcggaacgggtcgaacttggtttcgtccttgggcttgcggaagccgcccagcgggctccagcacacgaagttcagaccgactttcgccgtgtattccagcgtatcggcggtgtcgaggtagatcggcgagtactggttctgcacggcgatgagcttgtcgccgaggatgccgcgcgcgatgtcgatctgctcgatggaagcgttggagatgccggcctcctgcgccacgccctcgtccaccagctgcttgatggcttcgacggactcgttgtacggcaccttcgggtcggggcgatggaagtagagcaggtcaatcgtgtcgacgccgagcgcgagcgcgctctccttgccgcgcttgatcaggttttcggggtgcccgtccacgtcccaggtggggcggccgtcggtgaagttgcggaaatgaccgaccttggtggcgatggtgacctcatccttcgggccgttccaagaggccatggcctcgcggatcagcttttcaccggtctgctcttcgccgccggagcagtagtaggcccaagccgtgtcgaggtgacggcagccggcgtcgagtgcggcgtggatggtctcgatgcccttatcgtggccgaggttgttctcgatggtcagcggcatttcgccgaggccgatggcggtggtgccgaacggaccgaggttgcggtgcagtaccatgtgcatctccttgatggtcatatagtgtcgccctccacaatacgccgaggccgcggcggatacgaccccggtagcagcgaacggttctcaataagaaacgtgcgaggattccgcacaatttcgcacaatcgcacaaataggcaaagtcccggaattccagggctcagccgattttgatgttcatttcggccgacagcaggctcgcacctttcttattgagaaccgttcgctgctacaaatccgcccggagaccgctcatgtgactatccccacatttcacaccgacaccaaaaatccaccatcgcccaaaatcggcatcatcccaacgaaacactacatatagtgaccacacactgcgcgcgacacgacttgtaggggttcttgactacgctgtagtctgagcgagtcaacacgttcaccccagcgcatcaagggagcaacatgaccgtcaccgtgttcaccaaaccgtattgcccgcagtgcgacgccaccaagcgccagctcaccaagcagggcgtgattttcgagaccgtgaacctggagcagaatccggagaccctggcacagctgcagcaggccggcttccagcaggctcccgtcgtgatcacccccgatgcatcctggaccggctaccgcccggacctgattcgcgagctggccaagaaactggccaagaagaccgcgccggtggccgcatgaacggccgcgcccccggcatgccccagcctcatccgcgcagcaccccgatcgacctgaccgccgcgcacgccatccccgccgccgacagcaccacgcccagcacccccgagcagccggccggcaacacggtcgagcacatcggcgcggtcgtgtacttctcctccgcctccgagaacacggcccggttcatcgagtcctgccagctgagcggcatcggcatcgccgtgtaccgcatccccctcaagccgggctcggcgccgctcaacgtgcgcgagccgtacgtgctgatggtgccgacctacggcggcggcgacgcgaaaaaggccgtgccgccgcaagtgaagcgcttcctcaacaatccagcgaaccgcgcgtggatccgcggcgtggtcgcgtccggcaacaccaatttcggcaccgcatactgcgcggcaggtgacatcatcgccgcgaaatgccgcgtgccgttcctctaccgtttcgagcttatgggcacgcgcgaagacacgcgcaaggtgcgcgatggactcgtgcgtttcttccgggaccaccgcggctgaacgcgccacaatcaccgttattccagttactccaagggaaaactatactcatgactgacttcaccgacaccgagctgccgctcgacaacaccaccgacaccactgtcgagcagtacgatccggcgcacgactaccatgcgctcaacgcgatgctgaacctgtatgacgccgatgggcgcatccagttcggtaaggacaaggccgccgaacgcgaatacgtcaccggccacgtggccacgaacacgaagcgcttcgaatccaccggcgagcgcctgcgctacctgatcgaccaccagtattacgccccggcggtgttcgaacgctactcccccgagttcctggacgacttctacgcgcacgccgaatcctccggattcgagttcggcacgttcctgggcgcgttcaagttctacacgtcatacgcgctgaagacgttcgacggcaaactgtatctggaggacttcccacagcgttgcgcggcggtcgcgctcgaattggcggccggcaacgagcagcgggccgtcgaatacctcgacgagatgctctccggcgcgttccagccggccacgccgacgttcctgaacctcggcaaggcgcagcgcggcgaggcggtcagctgcttcctcgtgcgcatcgaagacagcatggagtcgatctcgcgcggcatcaacgcggccctgcagctgtcgaagcgcggcggcggcgtggcgctgctgctcagcaatcttcgcgagctcggcgccccgatcaagcacatcgagaaccagtcgagcggcgtgatcccggtcatgaagctgctggaggactcgttctcgtacgcgaaccagcttggcgcgaggcagggtgccggcgcggtgtacctcaatgcgcatcatccggacatcctgcgcttcctcgacacgaagcgcgagaacgccgacgagaagattcgcatcaaatcactggcgttgggcgtcgtaatcccggacgtcacgttcgagctggccaagaagaaggccaagatggcgctgttcagcccgtatgacgcggagcgcgtgtacggcaagccgttcgccgacatttccgtcaccgagcattacgacgagatggtggccgacgaccgcatcaggaaaacctatatcgacgcgcgcgagttcttcacgacgctggccgaaatccagttcgaatccggctacccgtacatcgtgttcgaggacacggtgaaccgcgcgaacccgatcgccgggcgcatcacgatgtcgaacctgtgctccgaaatcctgcaggtgcaggaggcgagctcctacaacgaggacctgacctactcgcacgtcgggcgtgacgtgtcctgcaacctcggctcgctgaacatcgccaaggcgatggacgcgggcctggccggcaccgtcgagacggcgattcgcgccctgacgtcggtgtccgaacacacgcgcatcgacgcggtgccctcgatccgccgcgcgaacgatgaagggcacgcaatcggcctgggacagatgaacctgcacggtttcctcgcccgcgagggcatccagtatggttccgaggaagcgctcgacttcaccgacatgtatttcatgacggtcgcctaccacgcctaccgcgcctcgcacacgctggccgtcgagcacggcacggcgtttcgcggtttcgccgattcggcgtacgccaagccggccggcgagggcaattatttcgacaagtacaccgacggccgccgctccctcgccccgcgcaccgaactcgtgcgcgccctgttcgagcgtttcggcgtcgcgatcccgaccgaggccgactgggccgagctgcgcgacgacatcctgcgcgacggcatctacaaccagaacctgcaggccgtgccgcccaccggctcaatctcgtacatcaaccattccacctcgtcgatccacccgatcgcctccaagatcgagatccgcaaggaaggcaagctcgggcgcgtctactacccggccgcctacatgaccaacgagaacctcgaatactacaaggacgccttcgaaatcggctggaaggccatcgtcgacacctatgccgaagccacgcagcatgtggaccagggactctcgctcacgctgttcttccccgacaccgccaccacccgcgacctcaacaaggcccagatctacgcctggcgcaagggcatcaagaccctctactacatccgcatccgccagcaggcgctggaagggaccgaggtgcaaggctgcgtctcctgcacgctctgaggaatcggtggatgatgtatgcgtataccgcctttcttcggcgctcgacgtaccttcgtacgccttcggcctcagacggcggtctccacacacgtcatccaccaattccgctccacagccctgcgcacgcccgcaactcaaggaacccacatgtcgccaatgatctaccggctcatactccgtctgaccgcgccggaggagtttgaagacaaacccgccgacgacgagatcgacgtcatccgaaagaacgtaacagaccacccccaacaacgaaaggcagacaaccatggcaccaatctccgtaccgcgcaaaccgctcaagctcatcgatcgcgtctccgcgatcaactggaaccgtctggaggacgagaaggatctcgaagtatgggaccgcctgaccggcaacttctggctgcccgagaaggttcccgtctccaacgacatccccagctggcagaagatgagtgacgacgagcacacgctcaccatgcacgtgttcaccggactcacgctactcgacacgattcagggcacggtcggcgcggtctcgctgattcccgacgcgctcaccccgcacgaggaggccgtgtacacgaacatcgcgttcatggagtccgtgcacgccaaaagctattcgagcatcttctcgacgctgtgctccaccaaggagatcgacgcggcgttcgactggagcgagcgcaacgagttcctgcagaagaaggccgaaatcgtgctcgactactacgagggcgacagtccgctgaagcgcaaggtcgcctccacgctgctcgaatcgttcctcttctactccggcttctacctgccgatgtatttctcggcgcacgcgaagctgacgaacacggccgacgtgatccgtctgatcatccgcgacgaggccgtgcacgggtattacataggctacaagtatcagcgcgggcttgagcgggtgagcgacgcgaagcgcgaggagatgcgcgagtacacgtacaacctgctcaacgagctgtacgacaacgaggtggaatacaccgagtcgctgtacgagcgtgtgggactgaccgacgacgtggagaagttcctgcgctacaacggcaacaaggccctgatgaacctcgggtatccggcgctgttcccggccgaggcgtgcgacgtgaacccggcgattctggcggcgctgtcgccgaacgccgacgagaaccacgacttcttctccggctccggctcgtcctacgtgatgggcaaggccgaggagaccgacgacgaggactgggacttctgacggatgtgtgccctcgcacggtggctgaaattgcgtcaccgtgcgagggcgcacacagtgacggtggcctcacacagtgacgctttgagcggtacctctgcgcccctcagcgcgacggttctttgtatgagaggctatcaaccgttggaatcgcaccggttacgcgcgtaggcgctcgccagcgccgccactccgctggcggccacgttcacgaccatgctgaaccgcggcgaccacgcgatcttctccgacacgacctacatcgccgcataccgtctgctcaaccagattttgccggagtggacaatacgttcaattcgccattcaacgcatggctcatcaaccgcggctcggtcacgatgccgctgcgcatgaggcagcacaacgcctcggcccaggccatcgccgagcacctgcaatcactgccgcggttgcggttcgtggcgtatccggggctcgaatcgcacccgcatcacgcattcgccgccagccagctcgcccgcccggacgccggtttcggcggggtactcacgttcggactgaacaccgaccatgacggacacaaccgtttcgtcagcaaactcaacgtcatcacgtcggcggtgtcgctcggccatgacgaaagcctcatcgtgttactgggcgaagacgacgaacggcagtacctgtatccgcccgggttccatcagggtttcttccgtctcgccgtcggtctggaggatacggacgacctgattcgcgacatcgaccacgcgcttagctgaggttgcgctctcaaaactcgcagatagaggggcttttcagtcgagaagcccctctatctgcgagttttgagagcgtgacttcagcggcctccgaaagatccgccgccaatgccgccggaggagcccccgaaaccgccgccgcccgagaacgaaccgcccgagataccgccgaaaccgccaccaccggacgtcgccgcgtggatgacggagccgatctcggagaaaccggcattcagccgcgcgccgaagtcaccgaagttcgcgctgaacgacgccgggtcgaaaccaccgccgacgccgccggcacccgccccggcggtcggaccgcccatatagccatacccgtacgggcggtagctccagtacagcagcgagccggcgccatgcgcgtccagccattgcggatcggtcacctgcgggtacgccttggcgaactccgccatcacgcggtccgaaatgccgaatgccgcggcatacaccagataccggtcccacagcaccatgtcggccaccccgcggtcactgaaattgctgaaatcctgcagataccggtacagtccctgcacctgtcccgcataccgttggccggaagacgtcagcgcactggacgcagcatatgagcacacgacgatcgacagcatcatgatcggtgcggaaatgatcagtgccagtgcgatattaccgccgaacaccgcgatgatgccggagaccagcgccagcgcggcgccgaggccgcccatccagctggccagcgtgccgccgttgcgcgtcgctccgagtatcgcgaactcggacgagcacgcttcggtgaacaggttcagcgccttgtacccgttcttccagtcctcgcaatgccgcttcatgccgtccagatcgaacacgggagagccgacgcgcttggagaccttctgcatcaggctcagcgcggcacgctcgctctggctcaggttgagctcccgcttcgcgtccttgtcgaatcccgccggcagcagcactatggtcatcgtcttgcccagcgacttcgccttgccctcgtcggcgccaatcatgccggccagacgcacgttgtcggcattgctcatgtcgacgccccggtacaggctcgacggacccggatagatggcgatcgccttcttcgaggcgagcgacagcatcgtcgccgtcatctgcagcgagtcgacactgcccttggacagtcccatgacatccgccatcttcgcggccgaggcagggctcatgtccggcggctcacgccagtattcgatgtcgccgtggtattgggattcgcgatagctgcgcaccgccgcgaccatgccgatggcgaacagcgccaatccggcgaggactactgcgatccacaaggccacgcgcacgcgggccggtccggcctgctgttgccgccacgcgatttcctgctggccttcggattgcttcagcttcggcaggtacgtgcggccggtctgctggcgcacccacgcggcatcgccctgccgccatccggacggaggcttgacggcggaggcgtcgtaggccgccaccacgtcgagatactgcccggcgcgaacatcggacgcactgaaacgcagcgagccgtcgtccatccgggaggtttcggagacaccggcgtagtgcagccatgcccagctgctggaggcgtcgatgccgtcggggaagcgcacaattccggtgaccttgccgatggggatcaggttgctgtcgccgaacggctcccactgccacgatgccacgtccttgtagagcgtggtgccgccgtggagcgtcatcgtcacgtcgaacttgagactgctggcttttttggtcgcagggatgttccagccgatctccacgtctttcgaccgccgcgaggtcgtgttgtcgctgatctcgtacccgtccttggcgggatcgaacggctgggggttctcggccccgtcggtcacgtccgcgatgtaccagtgcccggcgtattcgcggtcccatgacgtatcggaatggtcggccggcgatgccagcgcgccctgctcatagttttcgccggcggtgacgttgcgcacgctgatgtcggtgatgttggtcaggccgtcctctcgcagcgtgtacttctggtacagctgccgccatggtgtgtcgccgtcgcgcgtgcggagcttcatgtcgatgtgctgggtaaccttcaggctgccgtcggcctgaaccgcgacgtcatagtccagcgtgcggtagctcaggtcgggcgagcttccgctcagcatcaggccggcgccgatgacgatggcgaagacgacgagtgtgccggccaacgccgttgccagcgagcggagcagacgtttcaggttcatggcgatctccaatgatcagcagcgacgatggttccggcggtcggtgacgtcgggcgtcgggcgtcagaaacgcacctgcggcacctggcgggacccctcgtcggcctggaagtactgttcctgctcgaagtggaacatgccggcgatgatgttgctcggcaccgtctcgatcttggtgttgtacttgagcaccacatcgttgtagaactgccgcgcgtaggcgatcttcgtctccaggtccttgagctgcgcctgcagatccatgaagttctggttcgcctgcagctgcgggtacgcctccatggtcgcctgcaggttgaacagcgcgcgggacagcgcgttttcggcggtggcacgctcgacggtggtcgcgttcgggttcgccgcggccgcagcggctccggcgcgcgcctgggtcacctgggtcagcacggaggattcatgcccggcgtaccccttgaccgtttcgaccaggttcggtatcaggtcggcgcgctgcttgagctgcacgtcgatctgtgcccagccgttcttcacgcgattgcgcagcgcgaccagcgcgttgtaggcaccgaccgcccacagcaccagcgcgatgatgacgacgatgactatcgccagaatgatccaccccatgtgcactccttcgtatcgttgttgccgccattgaagcatgactatgtgaaatgatacgtcaccgtgtcgccgtccatgtccttcactccgcacggtatcatcaaaggacgtggccgccctcgccggcgtcgcgcagagcaccgtgtcgtatgtcatgagcggcaaccggccgatctcgcagaagacgcgggacaaagtcgagaaggcgatgcgggagctcggctacgtgcccgacgcgcacgcccgggccatgatcagcaaccgctcgcacatcatcggtctgctcaccgaaaccacggagaccacgcaaggcgcggagctgttcccatcctgcgggccatccgcgccaccgcgaaggaacacggctacgacctcatcctgatgtcatcgacctgcacgaccgaagacctcgccgacatgcgtcggctgggcaaaggcaacctcgtcgacgcattcatcatgctggacatccggcatcatgacgggcgtctgaaatccgcaatgaaactcggcctgcccatcgtgccgtacggcgaccccggcgagccgtaccactaccattgcgtggactccgacacgaaggcgatcgtgggcatggcgttctgggagatgcacgccatcggcgcgaagaaagcggtgatcgtcgaggacccgcgcggcgaccacgagtttccgttcatcaacatcttcgaccgggagagcgtcatatgcgccgaacggcatgggatacagctggagcggttcgaggcgaaggacacgcgctggcaatcgttcgagccgctgacagggaagttcccggagtggaagggcaacggcgtatgcatttacacccgctcgccgcggacgctggcgtggatagagcagatgatgctgctcaccggcgtcaccccaggcaaggacatcgggctgatcggcgagggcggtcgaagtcgccatcgagcagatcgaaggcaaggaattcgagcccggcgtagaacgcacgccgccgagattcacccgccgcgagaccacgattctcggattcgcgggctgaggccgcacaaggggcatgcggcctttgccgcaggccacatccggaaacggtgccatctcacttaccgtggcgaatgccccgccaggccggatcatccccaaattacgggttgaaattgtcgatatctatgattccccgtgcgaaatcgccgttttagggcccgaaagcggcgatttgacacggggaattgcgaataacgacaatttcaacccgtaatttgacgtgcaggatgggcgcgcggcacagaaaacacaaaaaagggagccccgtgatggggctccccgtaagtgaggcgcaggctacccgcgttggctcagaggacgccggctctcggacgtcgagccgttagtgcgagcggccatgccgcaagagatcagttctcgaacggatcgaagtcgcgacgcacgcggcggcgcggacgctcggagcgctccacgcggtcggcgcggtactcgtcgtagttctcgtcggtcgcgtaacgcgggttgcgatcgtaaccgccacgacggccaccacggcgatcatcggaacggccgccacggcggtcgtcgcgatcgtaatcgcggtcgtcacggtcggaacggcgacgcggacggtcatcgcggtcatagccgcggtcgtcacggtcgtcgtagtcgcggtcggaacgacgacggcgcgggcgatcgtcgaaatcgtcatcgcggtcgtcacggcgggaggagcgacgcggacggtcgtcgtagtcgcggtcgtcacggcggtcatcgcggtcggaacggcgacgcgggcctccgcggcggtcaccacggtcgccacggtcgtcacgacgaccacggccggcgttgttctcctggtcctcgaaaccggggatggcgagcgagatcttgccgcggtcatccacgccctgcacgacgacctcgacggtgtcgccttccttgagcacatcctcgacggcgtcgatgcgctcgccgttggcgaggttgcggatctgcgagatgtgcagcaggccgtcggtgcccggggtgaggttgacgaacgcgccgaacgacgtggtcttgacgaccttgccgttgtaggtctcgccggcttccggcacgtgcgggttggcgatctggtcgatgatggccttggccttctcggccgcttcgccgccttcggaggagatgaacacggtaccgtcatcctcgatggcgatctcggcgccggtgtcctcctggatctggttgatcatcttgcccttcggcccgataatctcgccgatcttgtcgaccggaacggtggtggtgatgatgcgcggggcgtactcgctcatctcggccgggccgtcgatgcactcgttgatgaggtcgaggatcgtggtgcgggcctcgtgagcctgctgcagggcaccagccaggatatcggccggaatgccgtcaagcttagtgtcgagctgcagggcggtgatgaactcggaggtgccggcgaccttgaagtccatgtcgccgaacgcgtcctcggcacccaggatgtcggtgagcgtcttgaagacgtgctggccatcgacgtcaccggagaccagacccatcgcgatacccgcgaccggggccttcagcggcacgccggcggcgagcagcgacagcgtggaggcgcacacggagcccatcgaggtggaaccgttggaaccgatggcctcggagacctgacggatggcgtacgggaactcctcgcggcttggcagcaccggcacgatggccttctcggcgagggcgccgtggccgatctcgcggcgcttcggggagccgacgcggccggtctcaccggtggagtacggcggcatctcgtagttgtgcatgtagcgcttggactgcgggccggaaagcgcgtcgatctgctgctccatcttgagcatgttcagcgtggtgacgcccaggatctgggtctcgccgcgctggaacagggcggagccgtgcacgcgcggcacgatgtccacctcggcggacagggtgcggatgtcgcgcaggccacggccgtcgatgcggtagtcctcggtgaggatgcggcggcgcacgatctggcgctgcagctccttgaacgcgttgccgagttccttctccttctcggcatcgtccatgtcggtgaactcgttcgcgagcacctcacgcacgtgctccttgatctcgtggatgcggtcctggcgcggcagcttctccgcgatggacagtgcctcgttgaggtcctcgtgggcgatctcgtcgatgcgggcgtacagctcgtcggtgtactcggggaacagctggaagtccttggtctccttggctgccttctccttgagctcgttctgggcttcacagatcaccttgatgaacggcttggcggcttcgagaccctgcgcgacgacttcctcgtccggcttgatctggccctcgtcgtagatgaggtgccaggcgttcttgccggcaccggcttcgatcatggcgatggcgacgtcaccgttctcgatgacacggccggcgaccacgatctcgaacacggcgcgctcacgctcgctccagcgcgggaaggcgacccactggccgtcgatcagcgccagacgcacgccggagaccgggccttcgaacggcaggccggagatcatcgtcgaagcggaggccgcgttcagggcgatgacgtcgtaggcgtcgtcgggatcgatggacagcacggtctccacgacctgcacttcgttgcgcagcgtgtgcgggaacagcgggcgcagcggacggtcgatgatacggcacgccaggatcgcctcggagctcgggcggccttcacggcggaagaacgagcccgggatcttgcccgcggcgtacatcttctcctccacgtcgacggtcagcgggaagaagtcgtagttctccttcgggctggaaccggcggtggtggtggacagaatcatcgaatcatcgtcaagataggctgccaccgcgccatccgcctgctgtgcgagacgacccgtctcgaagcgcagggttcgttttccgaacgaaccattgtcaataacggcctccacggccttgatttcgggaccctccatagggttcctcctttttttgttctattgtctgctgatatctgtaatccacatcgagacgccgaaatcccgatttgttcaagcttgtcggcttttctcattgacgcggcccgtcccggaccgcacccgttcattccagattcttcttcatcatcggccctcaaccgccgggccacagtatgtcatccgcgaattcgcaacatcctcatccacatgccgatatgcaaaacgcccgagcaaggaatgcccgggcggaagttctcttatcgacggagaccgagacgctcaatcagggaacggtaacggttgatgtcgacgcgcttgaggtaatcaagcatacgacgacggtcaccgaccatgagcagcagaccacgacgggagtggtgatcgtgcttgtgctccttcaggtgctcggtcaggtcggcgatacgcttgctcagcagcgcgacctggacctcgggggaacccgtgtcgccttcgtgcgtcgcgtacttggtgatgatttcctgcttttcttcagccgtaagtgccacggcatcctccttatagttgctgcgcggtgcacccggctttatgccggtgcgctctctatccgcgggcgaaacacgccaatgggatagtataggcaaggggtcggactacttccggcctttcgcggcagggtctcacaccgccgtcagcaatccgccgaacagcacaatgagcagcgccgcggtctcgatggcgaagaacaggatgaacgaagcccagctgcgcgtcagcacgttcagcggagagtccttcttgatgaggatcagcaggccgacccacacgaccgcatacaccgccacgccgaccccggccgcgatgattcccagattcgccgcattcggcagccgcgcggagtcgccgtacaccacgtacgtggagtaccagaaattcagtttgagcaggctcaggccggcgatgaactgttcggcggccagcccgaccacgaacacgatgcgccacagccagttgcgcgactccaccacggcgagaccgagtccggtgaacgttgtcagcgtcacggtccacgacacgaaggccacgccgcgcggggtgaacaggttcagatgggtgatcagccattgcgtgtggccgaccgccagggagcgtccgagccagtacggcgcgatgatggcggccagcaccgccacgatgaacaccgcccatggcaccgggtgcgactgccgccgctcgatatcggccagagacaggtcggtcaccgggatggatgggtccggatgcttggaaacgtcaacggtttcgacgtggtcaccgaccagttccgtcgcctcgttgttattggtttcgtccgccatgttcgcctcgctcgccatatgttctttactgacttccatgcacgacaatacgggctgaaatagacggaatccgggattcaccgtacattatcgccgtttcggcaccgcgaaacgtaccatttcgtacggggaatcttggattccggccatttcagcccgaaattgccagcgtcgtccgggccgatgccccggctctcacgagcgagggcgaccgcccggactcatgccgaatcagccgatccgcttgcgcaggccggccatcgtcacgcccgccgcggccaacatcgtcattgcggcgatgagaccgaagacgtcggcgcccgtgttggacagcttgccgtcggcgccgggcttgttgacacccggcttctcaccgggcttgttctcgccgggcttgttctcgccgggcttctcgccaggccgctccggctcggtgccgtcgctcttgaccaggcccttgatggccttgtcgagtgcagcgcgcagcgcggtgtaggtggcgggatcgccctcgccgttcgggtcggccttcagctgcttgctcagggcctcatacgcgacggtgaacttggcatagctgtccttggtgtactcggaagccttgcccgcgtaaggctcggcgtcgttcagcgcgagctgcgcgtagtcgcgtgcggactggtcgtagcgcagcgtggacttcgcggcggtgtaggccgcttccagcgcctcgccgtcggccttcgccagatcgtcggcgttggccagcgcggcggcgaagtcgtcgtacgcggactggtacttgttgtagctcgcctcggtgtaggtggcattgtcgttggagacgtgctcggccttcagctggtcggcggtcttcgccgtgtaccgttcgacacccttcatcgccgattcgagcgcggcgacggcggcgtcgaccttggcctgcgtggcgtcctggtcggcagcgacggccttggcggcggcaatcgcgccggcgagagcctcgcggctcgacttggtccagtcggcggagtcgaccttctcggcttcggcgaccttggcgttcagcgcgtccttggtcaccgtaccgggttcgtcgatcttggtggcggacaggtcgtacaccttccaccacttggaggtctgggccaagttggtgatgcgcacggccttgacggtcgcggcggagtccagcgtgaagatctgcttctggttgccgttcacgtcgccgatcttggtccagttgccatctgcatcctggtattcgatcttgccgttgacgatcgtgtcaccgcccttttccgcctggatgaagcggaactccttggccttgcgggcctcggcgtaggtgacggtgagggtggcgttggccttgacacagtcgcagccggcggactgcatccagaagaacgtgctgtcgtcaccgtcgatgacggccttcggatcgacgttctcatgccatgccgcggcgcccacgccgttcgtgctgaccgtggcgtcggagggcgtcggggtgacgctgccgctggtcttgaccttgacgaaggaatcgagcgcctgcacggtcgggcgcacgatgaccaggccgccacgggcgggcttgttgcgctggtagtaatcggcgatcgtatgcgtgtcggacttggcgaaagcggccttcgcggttgcgtaggtcgccttcgcggcctcggtgtcacccgcgagcgcctgcttggcggcggtgatgtagtcgatggcggaggcggtcaggtcgtcccagtagctgatccacggttcgatctggtcaaacatgttcttgtcgccggggttcgcgcggtagttcttcgcggcgcgctgcagcgtggtgtagacggtgagcgcctggctgaagtcggccgcggtggcggtgccgccgtccagcttgcccttgagttcggtcaggacgcccttgacgtcgagcttgccggtgtagtcgacggactcattgttgatccaccacttgttaacggcgtcatactcggcatccttgtgcgcgccgtcgatgccgccgtcgttgaggatgcgcatgttcatggcgaggtcacgcaggccacgggagcccttggacgcgatcggcgagttgtggtcgatgtagctgaaggagtcctcccaggactgttgtccgtccttttcgctctgccacaggttccagctgtagtcggcggccatgaagatgccctgcttgctcggctcggactgctgcatcgggttgagcatgatgccgtcgtaggtgccgtatgtggcaccgggcttgaggaagttgttctggcctcccatgaccaggtactggtaggcggtgttgcggttcatgtcggagcacggccagttgatccacatgaacggggcgcgaccggtgttcttggtgaacgtgtcggcgaagtccttgctggccacgccgaaggtgcggccgccggtcatgacgatctgcacgttggatgggatgtccttgtaccaggcgtcaccggctccggtgtagctgtacagggccgggcagtagaggatcgtgtccttgaggccctcgtacttcgcggtgccgtcgtcgttcttctcctgctgcagctcgtggatccagtcggtcaggtccttcagcacgcgcacgtaggtgttgtcgttgccgtactgcgcaccccagtcggtggagtcgtcggcgagcagtgcgatctggcgtacgccggcgtcaatggtctgcatgtacttggccttgagttccttgaggtccttctggtagtgctcctcggtgtcgaagcggaagtgcttgcccctagcctcgccgtcgttatggaacggcgcgagcgcgtaaacgaaacgcaccttcgacttgttgccggcctcggcctgcggcttgatctcgttctcgatctggtctttggtgtacaggccgcgccagttgttgcggtgcagcggatcgtccttgggggcgtacacgtaggtgttcatcttgtagtagccgccccaggtcatcaggttcacgcggtccttggtgctccacgggctgccgtaatagccctcgatgaagccgcgggacttgacgtcggcccagtcgctgaaggtcaggttgctgacggcgcggcccggcagctgctggaagatctggtacagggtagtcaggccgtagaacgcggaatcggtgtcgcgaccgagcacgaggatcgtgtcgggcgtcttcgcgttgccctgacggacggcaagcacataggagtcgttcttggagaacgtgctgtcgtccaccttcagggtgccgtcggcgatcagctgcttggcgtacttgtcgaccacgccgttggatccgttgatgccgaccagcacgttaagctggtacgcggtttcgggcacggcgtcggccgcggtggtctcgatgcccttgagcttcagagcctcgttcagacgggccttggtggcggaatcgattcccggttccacgacggtgttcgccttgtcgcgcagaatcagactgccgtcgccatactcggtgttctgcggctgggggtagatcttgtactggcccgactgttgggtcgtgccggagtcggccgccgtgtcgctgtcgctggccgccatggccggaaccgcgaacgccgcggtcatggcgatcgacgcgatggccgtcacgattttgcctagaatctcatgcgtggaattaccattcgctcgcatttgtttccttatctgttcttgtgatactgtgcaccgcccgcgcatatgcctcatcacatgaccaagcccacatcccggtgggcctgtcctcgtcgctacggtatatctggcgtgcggcgaaacgattgcgttcccgcgggttttcgccagatgccgcgatccatatttcagcttctcgtggcagtcgtcatcgacgacgcgttctctcaaccgttccgattagtcatgctagttttactatcgaatcatgtcaaacgcgattggacggccggacttgccggtgaagtggcagtggagcggatgacgggaatcgaacccgcgtaatcagtttggaagactgaggctctaccattgagctacatccgcgaaaatgtcgcttttggcgacttgagctattatacacatcgccgacgctttggcaactcccgtgtccatgcggaacaggaccgtcaaaacaggaccgccggaacaggcgtcacaccatgagaccgatatcgccggtgctcagcctctccgtctcccctgatgccgtgcgcacgctgatcgaagcgtcatcgttgagcgataccaccttgccggcgatcgtccggccgtcgatgagctgcgcgtcgatctgccgccccatcatccagcagacgtggtgcatctcggagcgcaaccgggaactctggatgagcggcatctgcacgaacgcctccagacgggtgcgcagtgaagcgaccaggcgcgccgcgatcatgtcaatcagttccgcggtcggcggcagcggcgcgacgtgcatccgcagcgacgtggattccggcgtcggcaaacgatccgcgggcaccgacaggttgacgcccacgctgaagatcacggcgacgtcaccgtgccggtcgggcggcgaggcgacctgggtgaacgtgctgccaagcttgagtccatggcagtaaatgtcgttcggccatttgagatggaacccgcattcggggtcgaacgggaccgcgccgcactcgtccagggttccttcgatggcgtccagagtggccaggccggcaatcatcgacatccagccgttgaccgcgtcatcggtcgccaccgattcggggatggtcacgatgaacgatatggcgaacgagtgcccgggaacgcatgcccacggccggccgagccgtcctcgggcgtcgtccatggcaccggcggcgaccacggtgatggcgatgccgccgtcatcgttgcgcgcgaacctcccccgctcgatgagtcggcgtgccttcgcatgggtggaatcgatgcgttcataggcggccacctcgtccgccgcttttgcagtccggtcaagtcgcggcgctgcgactttgtgtaaggcaatcatgatgatactgtacgccggaagatatggcagcgtcaaaacggatgtatcgtcacacaagcgtcggccgcatacgatacgacccgctggtgcgtctcccgggagtcttgcccgagcctcgcaccagcgggccgtaaacagccgacgagcccgatgccggattctgccccgacatggatggcgtacactcgccagccgatgcctgcggacgccccaacggatatccgcctgcatacatacctatgacgcacgcttattttgagcgtcgtcttcaaagagcctgagaactgtccgtatagcggcgtcatgactgccgaaaaccgccgtcacacggtcaacatggcgacggccgaggcgataccgccatcatggctcagcgagacatgccaccgaaaaaccaaggaaaccgatgcgctcgacgccgcagccggcgcggaacccgtgctcaccggagtcacgatcggcatccgcatgaccgcaggccccatcctgaccaacccgggcgcgcccgacatttcatcggagtttctggaggctgcggggggcagcaacgcacacagcttccgctcgacgtccggccgcaacgcaacgcacggtcggccgcgcgaatcatccacgatttcaatgccgttccacgggaaattctcgatggtatacgggttcggcatgtcgccgagcgcgtcgcaccaggctttcagcaccgcttccttgccggcccacttcgccgccaagtgggtggactcgtcatcgttcttgcgtctggcccgctcgccggcctgcctcacctcgcgcacagagaacagccctcgcatgcgcgaacccggttccgcaagctgttcggcgaacgccgagacatcgacgacatcgtgcccgagaccgagaaccgacataccgcgccacctttccgagagacctgttccagtgtatgacgggtccggaccgctttgcgtccttaagtgcgcgccgaaacgacaagtgtgcgcacttaaggacgcaaatgggctggtttgcgtcgctatgtgcgcggacacgtcgtttcggcgcgcacttacgaacgcaaaatgggcccacacgcggaaacgtgcgggcccatcattcagcagtcagacgtgactcggcagatcaggcctcgaagaagccggactgaccgaggcgggcgtcaggctgagccatcaaaacggggagtccagtgaactccccgtaggcgaagcgagcgggcgcgctacctgcgcccgcgagggaatcctgacgaacgactcggcagatcaggcttcgaagaagccggactgaccgaggcgggcgtcaggattcaacagcatggccttttcgacttcgtggccgttgtaacgattgccgtcggcgagcttagtgccgtcctcgcggaagcgacggttgtcgatcggctcgtagagcgccgcgcgacccatcatgccttcctcaaggtgacgctggccggcagccagacgggcgttcgcgcgctcgcgccaggcgttcagtgcgtcctcacccgcggtgtgtgccacggccgcctcgaaggcgcccgggttcacgatcgcggcgaaaccactcacgtggccgaagccgagcgaggtggcgaggccggccttgacgcggccgacgtgcagcggcttggtgagccacaccatgtggtcgtcgcgctccagcttcgggtccacgcagtcgagcgaggcgttggccgggatcacgccggacttgaacagctgcgtcaggccgttgacctggaagatgcaggcgccgcccttcgcgtggccggtgagcgtcttctgggagatcacgaacagcgggttgccgttcgtgcggccgatggcgtgcgccaacgtgttgtgcagctcggactcgttcgggtcgttcgcgttggtggacgtgtcgtgcttggagaccacggcgatgtcgtccggggtgacgccgagcgcggccagatcgtgcacgagcttcgagtcgcggccgccgaggccagccgccagggcgccgaggcccggggccgggatcgaggtgtgcgcgccatccgcgtacgagtggatgaagccgactacgccggcgaccggcagacccatgcgaagcgcgatgtcaccgcgcgtcagcaggatcgtgccgccgccctgggactccaggaagccgccgcggcgacggtcgttcgcacgcgagaagaagcgcgcgtcgatgcccttcgcgtacatctcctccgagttggcggtggcgttcatgttgccgaagccgatcacggattccacgccgatgtcgtcaatcgcgcctgtgaccacgaagtcggccttgccgagggcgatcttgtcggcgccctcctccagcgacaccgcggcggtggcgcaggcggaaaccggctggatcatgttgccgtagccgccgacgtaggactgcatcacatgcgcggccaccacgttcggcagggcctcctgcaggatatcggtcgggatctcatggttgaggaagcggtcaaggtacagcttgcgcatcgacatcatgccgccgaagccggttccctgcgtgctcgccaccatcgagggatggatggcctgcagcacctcggtcggcgtgaagccggcggacaggtaggcgtccacggtggtgacgatgttccacagcgcgatcttgtcgacgtcgccgaccatcgaggccgggatgccccacttgagcgggtcgaagcccttcgggaactggccgccgaccgtgcgcgtcatcgtggcgcgacgcggcacgcgaatcatcgaaccggcgtgacgggtgacgttccattcgcccgactccgggtcggccgcgatggaggtgtgcgcctcgtccatcttgacgtattccttggcgatgtcctcggtgggcacggagaaggtgacatcgtggtcgaggaagacctcggtctcctcttcgtcggcgccgtccttgtagtcgttgcccatgccttcatcgaacggacggatgccggagcgggccacgacctcgtcatggtagcgttcggcgatgtcctcttcgggcacgaggttgccgtcggtgtcgtaccaacccggcttcggactgtcctgccattcgaccagacccatgttccacgcgagttcgagcaccgcgccggcggacaggtcgacgctgccgtcggagtggattccgagctccgcctcgaagcgggtgcggccggagccccacgggcccagctcgccgatggagacgatgacgatctcgtcctcgggcttggcggtgacgttctgccagtcggccaggtcgaccggcgcctgctgcggcacgtgcgggctgggcagcgccttgatgctcaggccggatgcggcggtcttcgcggaggtggagtcgtcgtccgactgctgtgcggaagccgcggccttctctgcgtcggccatcgcctcggcgcgcagcgccttgatatcgatcggggcgttgccgagcccaccggtcaggtccacgtcgagcggatgctcgactgcttccgcgcgggattccgcggtgcacaggtcgagcagcttcacggcgatctgttcggtggagtacgtgtggatgccgtggcgttcgacgacctcgaccagcgggtcgttgccgcccatcaggccggtaccgcgcacccagccaatcttcgggtgggcgaaggtgacacgagacgaccataccttttcggcatgggcgcggttgacgatcgcgtcaaacgcgctcttgacctcgccgtacgcgccgtcgccgccaaagatgccgcggttcggggagccgggcagcaccacatgcagcttgtgctgcacgtcggtgtcggcgccgatggcggataggccggcgatcgcgcgttccacgccccacagcatcagtcgcgcctgggactcgaacagttcgccggagtcggtcaacgtgccgtgcaccggcggggcggcgaacgggaagaacagcgtcggctcgtatgcgggcttcaggatcgtggtggtcgcgccggaggtcttcttctgcacgttgccgatccactggaccagttcgtccacgtcgcggtagctggacaggttcgcgggaaccagccacagcttggcgccgcccaccgcgtgctcgcggtaggtttgcttcgcccacgccttgacggacggacggaagctgtgcgaggtggcgatgacggtcgcgccgccggccagcaggccgttgacgacctgcgcggcgatcgagttcggagccacgccggtcaccactgcgatgtcgttcgcgaagcgggatgcgtcaggcacgtcggcgaccgattcgagggcctcggtggcgatgcggtcgaaggtgtcggcgagctgtccatggctcttggacgcgaaccacttggcctggtcggcgacgtccttgccagcgccgacaaagctcagggactcgacagactggtcgccattgtagaacaggcgagccaggtcttcgcgcgcggatgcccagcggtcatcgaagaggatggccttgcgggagtcgaagcgcggctcgacctgcttgggccagtcggagccgagctcggcgtcgacggcggccacgacggccgcgttctcgtcctcgccgggttcggcggccggagccgtcacgcccagttcgttgagcacgtaacgggcggtggaggcgagcacgccgttggcaccggtgaccttctccgcgaaggcgtcgagcgccgcggaatccaccacggcaccgccggctgcgccgccggcgctcggcttggagacagccacgcccttggtctgcccgaccagggccaccgcatcgtcgatgagctgatcggcggcggccgcattggcggcggcgccggtgggcagcttggccagatcaccgccacgcgagctggcaccctcgcgggtgtcgagcagcagggccgcggtcacggcggcaacccagccttcgccgagctgccacacgttggtcacgcgttcgcggatgtgcgcgggcttgacgccggcggcaccgaacagcgcgcgcaggcggtcacggatcgcatcagacagtaccgggccgaacgccttgtagttcggggcgaccttgttgacgagctgtgcaagctgggtgagcgtcgcctctgcggcgccatccacactggccacacccagctcggagctgatatccatcagcagctggttgcggcgggacgacacgccattggtcagcgtgtcggtcgtgtcgttcgcgccgatttggtcgaggcggatctttgtggagtaagccatgagcacaccgatggcgtcggacgccttgaacggcaggtcgtcgaccgggccgctgacggcggaaccgagttcggcgacggcggaaccgacctgagcggcggacggcgcggcgacgactgccggagccgcggcgggcgcggcggcagcgggcgcagccggagccggagcagcagcgggcgccgaggtctcggtctcctccggctcatcgtccggcaccagcgaatcagagtcggtcatgtacacacggccctcatcgcggccgacgttgtacacggtcacgtcacaacccgagaaatcgggcagtcgcagcgtcttggagccgagattggcgagcgtcggcgagttgccgagaccaacctccacgtactcctccacgccgagaccaccgcggttggcggggttgaacagcagcgcctgggtctcgatccagcgcacgggggacgcgaactgccacgacagcagttcggtgagcagcagacggccgagcttctggtcgtcggcggcgtaggagtcccacactgccgggtcgtccagagcggccttgatgcgctcggacggcacgacttcgaggatcttggcggcgaattccttcgtcatctcgaacggggacgccaccaggttcgggatgtaacggtcgaccagacggccacggtagtcgatgtactgcggcagcagcgcgtcgagcttatcgcggaactccggcacgcccttgcgaagcagcgtggagtggaacggcacgtcgatgcccggcaccagcatgaacggcggcttgccgccatattccttggcgcggcgggacgcgtcggcctgcaggtacttcaggccggcgatcgtgccggcgatcgcgtactgctggccggcgaggttgtagttcacgatctccagaaactcgccggacgccttggcgacggactcgacgtattccttgacgtgcgcgtcgttgacgccgaactggttcggacgcagcgcgcccatgcggtagttcgagcggccctgggcgtcgcgctcgatcaggtggtgcatggtggagccgcggtggaacaccagttccagctcggtttccagcgggatgatgtcggcgaacgcggacagcgcgttgtactcgccgagcgagtggcccgcgaagtacgccggccagatgtcggagccggcctcgcgcagacgcgcggtctgggcgtaggccaccgtggcgagcgccacctgcgtgaactgggtgaggttgagcaggccgtccgggtgacggtaggtcacgccgttggcggtgagctccttcgggttgtcgcgcacgaccgcgaggatcgagaagcccagcttggagcgggtcagcttgtcggcgcgctcccacacgctgcgggcggcgggtgacttggcacgctcgtcaagcaccatgccctgtttctggatgccctggccggggtagacgaacgcggacttcggcgcgcggaccagcgcagtgccgcgcgagaccagctgaccgtcgatgcggcaggtcacttcgaatgccatgccgccgtgctcgaccttgccgacgcgctcgatggagatctccaccttgtcgtcgagctgcaccatgccgtacatgttgtaggtccagcctgcgatctcgtagtgagcacccttgtcgtccagcgcctggacggcgtgctgggcggtggcggacagccacatgccgtgcaccagcggggcggcgagcccggagatgcgggcgccgcgcgtggaggtgtggatcggattgaagtcgccggaggtacgcgcgaatgcagtcatgtcatcgggcgcggtgacggtaacgcggcgcagcagacggcgaggtgtggcctgcaccgtggctgcggcggagccgtcctcatgcttggcttcgagggcgccaccgtattcgggggcgtcggccggcagcgcgtcggagtagacgcggccgcgaatggcgaagcgctcggtctcgcgggcgagcacggtgccgtcggcggcggtgtgcagcacgtggatggtcacgacgcggccggacgcggactcgaagtagtcctcggcccagctggtgagcgtgatggtctcgtcgacgcgcttcagcagctcgtcctcggtctcctcaagctcgatgaggtggtcgagatgcaccgcgttgagcagtccctcgatgaccgggtagcccttgacgtacacggagccgagtgccgcgtagatcgccggccatgccgggccgaccagcgcgtcgggggcgatgcgcgagggcgcgaggtcctgcggcagcgcgccgccggtggccgcctcgtggtcgtagccgaggttggcggacagcgtgtaggtggccgacgcggtgccgaacgggtaagcggccttgtcgtcggacggggtgatcttcggcatgtcggtcagcttgtcgccggtgatggcggtgttgccgatgcctgcggtggcggcgagcatcgcgtagacgttaccgaccaggcgctcgcggttgacgaccggcagcaggccggtttcggtgccgcgcagcgtcaacgggatgacgatgtcgcgcacggcgtgcttggagacgccaccgtccggatcgttgtcccagtacgtgtcgagatggatgtcgaggtcgtattcctcgccctgctcggaagcgccgcggtcgatgatctcatagttggcgtcgccgacctgcgtgccgtatgccgggttcgtggtcaggtggccgacccaggagatgttcgggcaggtgcggatgaacacttcggcgctctcggcgccgccgagctcgctgtaggcgtcggtggaggcaccggactgcagttcgcgggtgcgctccagggccgcggcctcgaaacggccgaggatgtgggcgacgggctcgtcgacggtggtgatgccggccacggagatcgggccgggaatcacgcgcacggaatcggcggaatagcgggcgtcctcggactgccacagctgatcctggccccaccagcgcagcaggtcattgtcgatgaccggcacgaacggcatgggcttgggatattcgctcacgagtaccgggaaccaagccacatcggccggggtcacgtggatttcggcaacctgcgggtaggcggcttccagcttggcgatggcggccttcggatcggaggcgacatcgtccacgccggcgaacagcgaggtgaactcgccggattcctgaccgcacacacgggcttcgatgcgctgcagcaggtgcaggaagcgcagcgaatacgtcgggtcgaccacggggaacaccaggtcgacgaaacgctcggcccactcgacgtaggtcatcgaggcgaggtcgccgaagtacggcttggcggtggcgtcgagcgccttgatgatctcgtcgcggcggctttccagctcttcggggtgcttcatgacgcgcaccaacagacggccgcaggcggcggaggcgttctcgacctcgtagatgtcggcgtgaaggtggctcaggccggaggagactccgccgaccgacttgccggacggcacccacttctcgccggcgggcgcgaacgggtcggcgtcggccgacgtgtcggtgatgccgggcgtcttgacgagcagctgcttgaccgcggggctggtgtgggcctccttggcggtcatgacggcggtgccgatgagcacgccgtcgaccggcatgtcgggcaggtcgtaggcgcgcgcccactggccggagatgtagtcggccgcgcgctccggcgtaccgatgccgccgccggcgaccagcacgaggttgctgcatgcgcgcacctcggcgtaggtggaggtcagcaggtcgtccagcgactcccaggagtggtggccgccggccgaaccgccttcgacctgcatcaggatcgtcgtgggggccacggccttggcaatcgccacgacctggcggatctgcgcgacggtgccgggcttgaagccgacgtagggcagaccgtccgcctgcagggaggcgacgagcgccttggcctcgtcgagctcggggatgccggccgagacgatcacgccgtcgatcggcgtgccggacgcgcgcttcttcggcacgatgccggaggggccgaactgcaggttccaaaggtagcgatccatgaacatcgcgttgaattcgaccgtgcggccttcttcgagcaggttctccagctcggcgacatgacggtcgaacacgtcggcggtcacctggccgccgccgccgatctcggcccaatagccggcgttcgcggccgcggccacgatctcgggatccacggtggtcggggtcatgccaggcagcagcaccggcggcttgccggtcaggtcggtgaacttggtgcggatcttgtcgccggcgggagtgtgcaacaccttcggcgcgaacgtcttccagttctgggtgcggacgggctcgtcctccatggtggacagcgcggaacgctcggccatcgtggcggcttcgaccacgccgacgccggtgccctggatcaggttgccgatgagcttgccgagcgtgttgcccgggccgaagtcgacgatccacagcttggacggatcgcaggattccagcatcgccttgacgcgggccgcccaatcgacgtggttgagcagcacttcggcggccagctcgcgcgtacgggtctccttgaagccgcaggcgtgcgcccaggccacggcctgctcgacggcatcggccatcagcggcgagtggaacggcagcgtgacctccaggtattcgaggacgggcccgaacaccgcgccgccgcggaccttctcgtcacgcagtgtctgctgacgcttgtgctccttgccggcctcgacctcgaaggcggcaaggtcctccgggtagccggagagcacgtggttgttgctggagttggtgacggcgatgctgatcgggccgcgcgggttcggcacgcgggatgcgagcacctcgacctggcgcttggtggcgccgcgcacagacagcatcggagtggcgccggcgtgctgcgcggtgagcgcgagctcgcgcgccttgcgggtgccggccacgccgatcagctcggcgatggccaggatctcgtcgatctgctggcccgcggcctcgatggagccggccttgcggatgacgttgaccatgtgcgcgccaagcacgccctgcgaatggccgagcacggcgacgggggcggtgttcgccacgtcaaggccgagaccggcggcgtcgatcagcgcgccgagctgggtgagcgcgatgccttcgacgctgacggtcgccgcggcggcggtaccgagccgtgccgggttcggcttgaagccgaacaggtcgacggcgcgtccggtggtggcaagcaggtcggcggccacgggggcgagcatcgtgttcgccgcggcgacatggccgcgcagcgtggcttcgagcgccggatcattggtcaggtcagcgagcgcaaccggccagggtgtggactgtccgccgaaagcgagcgcatgaggttcgccgttgagccgactgagaaagaaattggggtctgacatgggttggtgttccttcttttatttggacattgtgcggagccgccgttgccggtatcggctcaagatctgttgtgccgcggagtggccgccgcggcgagatggactacagcggctggttgccgtgatgcttggtggtgcggcgcacgcgcttcttgtcagcgagcagtcgcagcgattcggcgatggcctgacgggtctgctcgggatcgatcatcgcgtcgatctcgcccatttcgagcgacaggttcgcgttgacggtggtgcgctcgtattcggcggcgagcttggcccgcagcgcgtcgacgtcctcgccggcctccttggccttgacgaagtccttgcggtggatgatgttcaccgcgccggtggcgccgagcaccgcgatctgcgagctgggccacgcgaagttcatgtccgcgccgatcgccttggatcccatcacgatgtacgcgccgccgaacgccttgcgcagcacgacggtgaccatcggcacctgcgcgttcgcgtaagcgtagatcaccttggcgccgcggcggatgatgccggcgtgctcctgatcggcgcccggcttgtatccgggggtgtccacgagcgtgatgaccggcaggttgaacgagtcgcacagacgcacgaaccgcgccaccttttcggaggcgtccacgtcgaggatgccggcgcgaacgttcggctggttggcgaccacgccgatcggccggccgtcgatgcaggcgaatccgacgacggcggacgtggcgaacagctcgtgcacctgcacgaattcgccgtagtcgacgatgcagcggatcacgtcgagcacgtcatacggctggcggtcgttgtccggcacgatgtcggtaaggcgtttcgcggtctcgcggtccgcgcgagtcgccgcataggcgtacatcgggggctgagcgtcgctgttcgacggcaggtaggcaagcaccgtgcgcgcgtagtcgatcgcgtcggcctcgtcctcgccgaggtagtgcgccacgccggatttcgtgctgtgcacgagtccgccgccgaggtcgttcatgctgatcgtctcaccggtggccgccttgacgacgtccgggccggtgacgaacatgtcggagttctccttggtcatgacgatcaggtctgtcagcgccgggcagtacacggcgccgccggcgcacggacccaggatcagcgagatctgcgggacgaagccgctggcgtcgcaggtcttgcggaagatgtggccgtactgcgtcagcgcggcgacgccttcctggatgcgggcgccgccggagtcgacgatcgcgacgatcggcaccttcaggtccagcgccatgtccatcaggtggcagatcttctcgccttcggcacgacccagcgtgcctcccctgacggagaagtcctgcgcgtagacggcgatcttgcggccgtacacgtcaccgaatccggtgatgacggccgaaccggccttgccgccgttgatgtcgccgccgcggaaccggccgatctcctcgaacgagccggtgtcgagcagcagcccgagccgctcgcgggcggtcatcttgcccttggcgtgctggcgggtgcgcgcgttggattcagcgtcacgcgcgagttccgccgcgcgtaccaccgctgcgcggatcggctgctcgccctgcgcctgtgcggcgccgtccgccgagacgtgcccaggttgtttcatgacctgtttcacggccggcgagttcatgatatcggtcatcacttgccctccttgccgctcttcgcggtgcttgcggacttgccgccgtcatccaccgcgccggacttgtcgcgcgccttggcaccgtcgacgtccatcgcgaccagcgtctcgccggcctcgacgccggtggcgggcgcaacgaagatcttcgcgaccgtgccgttgaccggcgcgtacacgtagttctccatcttcatcgactccagcaccaccagcaggtcgcccttggtgacggactggccttccgcgacgttgatgcgcgtgaccaccgcctgcatgggcgaggcgatgacgccggacttgccgtcgttgtgctccttcttctccgcgatggcgtgcagcccttggcctcgcagcggctgcgacgggcgcttggctccgcgcgaacgccccgctcccatgaggttgttgacgatgtcggtcggcacggtgagcttgacgcggcggtcgtcgacctcgatgacgaagctttcgctcgtcggggccttcgcgccggcgtcctggccttcgccgctgagcgacgccggctgtcccgagcgcacggtctgcggctcatggttgaggtacttgcgctccagccacttcgtgctcacgtcgaagagatgaccatgctcggcggtgaactcatcgtcgttgaagatctgtttgaacaggctggccggggtcggcacgccctcgatcacgagttcgtcgagcgcgcggcgcacgcgggcgacagccgcctcacggctctgcgcagtgatcacgaccttgcccatcatcgaatcgaacttcggcgagaccgtgtctccctgctccacgccggtatcgatgcgcaggccggggccggacggccagacgatgcgctccagcgtgccggaggacggcgtcaggttcgtcgccggatcctcgctggtgatgcgcagctcgaagctgtggccgcgcggcgcgggggccggtgtcaggtggccgccgtcggcgatatcgatctgctcgcgcaccaggtcgagcccgcacacctcctcgctgaccgtgtgctcgacctgcaaacgcgggttgacctccaggaagtacaccttgcgatgcggggtcaccatgaactcgcacgtgcccagaccgatgtagtcgaccttgttgaacaggctgcgcgaatacgcctccagctggttgatgacctcgtccggcaggaacggagcgggggcctcctcgacgagcttctggttgcgccgctgcacagagcagtcacgcgtcgagtacacggtgaagtcgccgaaacggtcgcggccgcactgggtctccacgtggcgggccttgtcgatgaacttctcgatgaagtactcgtccaggtcgccgccctgcatcgcgtcatggttcaggtagaagcgacgcatctcgtcatcgtcgtgcacgacggtgatgcctcggccgccaccgccgtcggtgcgcttcatcatcaccgggtagccgtacgtgtgcgagaagtccagcagcgtgcgcagctcgcgcaccggctcgctgatgcccggcaccggcggcacctgcgcggacttcgccacgcgacgcgcggtgatcttgtcgccgaggtcgatcagcgcctgcggatgcggccccacccagatcgcgcccgctttctcgaccttgtcggcgaagctcggcacctcggagaggaatccgtagccggggtgcacggcgttcgcgccggaccggtgcaggatgccgatcaacaggtcctcgttgaggtatgtgctcgcgtatgtgtcacccgacagcaggtacgactcgtcggccagctggacgtactgggcgttgcggtcctgttcggagtacaccgccaccgtggaaatccccatctcccgggcggttctcaccacgcgcagcgcgatctcgccgcggttggcgacgagtatttttttgacgatatttcccatatattccactatcgccgtatgcgcgcgagcgcggagtcaagttttcgacaaaaacggcggcgatattttgtagagcgaagacaaacggccacgtaagttccggcaccgtaaccggcgaacatccacaaaaggccgtctcgacttttgtatgttcccgacaggccgtctaaggcgagggctttctatcattggcgacaacggggggacactcgccgtccgttctttcatcatcgagaggggttattcatgtccgaacgtactgtttccaccgcccagcgcggccgtatgctggcttcgaccatcggcaagccggtgctgttcgccgtcctcatgtggctcgcttcggcagctggtgagatttcgatccctggcaccccggtgccgatcacgctgcagaccttcgtcatgatgctggcaggtctgatgctcagctggcgtcaggcaggcagcgcggtggtgctgtatctggccgccggcgcggccgggctgccggtgttcgccggcggcgcctccaccgccgccctgttcggcccgagcgcgggcttcctgatcggcttcctgccggccgtaatcgtcaccgccctgctgcgcggcaaggcgcgtcttgactcggctccgcacgccgcgctgaccgccgtccgctacttcggcgcctcactggccggcaacctggtggtgctgtacctgttcggcatcacgattcagtccatggtcatgcatgttccgttcacgaccgtggcgattgcgtcgatgggcttcgtgatcggcgatgtcatcaaggccgtcgtcgcgtcgctcgcggcgaccggtctggccaagctgttctgattcgcgtcgctgttgtcgcagcgaacggttctcaatagcgtttgtgcgaggatttctaacattcccgcacaaacgctcatatggaagaagcccggaattccgggcttcttccatattttttgttcatttcggacggatgcaggctcacacctttcttattgagaaccgttcgctgcgactacagcggcaatacgccgacgtcggccgtgtgcacgacatggttttcgcccgcatcgtcacgcacgctcagcgacgcatcggcgttcagcgccgtcgccgtaccggtcagcaccgaaccatcggtgaagcgcgcctcaacacgacgtcccagcgtccagcacacgcaggaggtctcctcgcgcagccgctcggcggcggcatgcgggtctgccacgaaaccgctcagtcgggaactcagcgaccgcacgatatgcgcggcgatcatatcacgcagtgtccgggcatcgggcagcccttgcacatgcagttgcagtgacgtggactgctccgtgggcaaccggtcggccggtatcgcgaggttgatgccgatgccgatcaccagcgccgcgctgtcatcgcgcccgggcagcggcaccatctcggtgaggatgccacccagcttgcgtccctggcagaacaggtcattcggccacttgagccgcagaccgcaatcttcactggccaccccacattcggcgagcgcgccccgcagcgcatccagcgcggcaaacccggcgatcaccgtcagccagccgtttacgctgccgtcggcgatcacgcccgccggcagcgtggcgatgtacgagcaggtcatcgattcgccgggagcactcacccatgtgcgttccagccggccgcggcccgcgctctgcacatcagtggccaccacggccacaccggcacccccgtcggccggaggcgccatggtgccgtcgcgcagcatctgccgcgccagcgtattggtcgatgcggtttccaccaccgcaatcacattgtcagccacctcggtggtgcgtggcatgtttggaatgattccccttgttgtttccgacatgccttcagattatgcccgatatcgtcctacggcaaatgccggcaatggcacgatcgccgccgttcaaggcgcatcggtagaataccatgacatgaccacagctcacatcacggatcactccagcgccaccccggcccgcggcgggcgcggaggcagcggcggcaggtcacgacgcgccaccggcatcgccctcgcgcgtctcgcggccgtggcgcgatggacgctggccgtcgcggcctgcctgtggatcgccttgtgcgtggcggtggggccgctctactgggcagactcctcgatcgcggatttcggcgcggtgaactggttgtttgccgttgtcggattccttgtaccattcgccgccgtggtcgcaatgactcgctgggcgaacggcataccggtgttcggctggtccagcggcaagaacggcctgcatccacggcgcctgattccggcgggcgcacgtcgcgcggccgcgcggctcctggcatccgctcccggctcgtgggtcagccggaccggacggttcctcgcccgggtatgcgtacgtgccaccgaccggtggtggaaaatcgcactgatcctgttcatcggctggctttgggtgccgacgacgctgctgtccgcgttcggcgccgacatccgctctcaggctcgcgagttcagctgggcctggaaccaatggaccggcctggatcagccgtatatcggattcttctcattcgtgccgatggacatctatccgaccgcgcactacatatggccgtcgaatccgacgtacctgaccgatcagcacaacatcgtgctgacggtactgtatggtgccgtgctgtcggtctcccggtatttcaccgattccaacgatgtcggattcgtggtgctgtcatccgcgcagttcctgttcgccgcgttctgctgcgccgccaccgccaaccggttcttcaacttgccgtggctgccgcgccgcgccggcattgacttcacgcatcccgaacgcgggctgatggcactggtcatgcttgatttcacgcatccggagcgcgggtacgcctcccccggcttcgcggcgcgggcatgtgccgggaacggacgcctgcccgaaggcgcctcgggatggttctcgcgtctggtgattatcctgttcttcctatgctgtccgctcgcggtgttctcgacgatctcgctgacgaaatcgcctctgttcgcgttctcgttcgtgtgggcgttcggcgtgtggtacgagctgttccgtacgtggcgaggcaagggcgacaaggtggtcaggctgcgccgccgcagccttatcgcattgatcctggcctgcgtggtgatgctggcgagcgcgaagtacgcttggtacatcatcgtgctgcagctgattcttgcgctgctttccgaccatcgccgctggaaggcgtacgtcgtcgcgttgctgctgccggtcatcgtgctgcatggcggcgtcgtgatgctgacccgcaccggtgcgatcgtcagcggcgatccgatcgaaagccacggcgtccagctgcagcagatcgcccgcatcgccaagcgcaatccgggcagcataccgcagtccgccagggaggagatcgcgccgatcttcaatctcgatcagatggccgacgcctaccagccgcaggatgccgacccggtgaagtcgtccggcatccagtcgaagaaggtgagctaccgctggcggtcggtcacgcaggaggacatggcccggttcaacagcgcctggtggcagatcgtcaaggccgatcccgtcaccgccatcgacgcgctgctggcgaagtgcttcggctatttcaacccgatggatcagccgtacgtgtcgatggattactacgtgaacagcgattatgtgacagaccagaccacgtggatcaaatactggtgcagcgagtggcggcagtccatcgccgagggcgcaaagcagttcggtgagattccggtgctgggatgggtggctcacggcaacctgtatgtgatgatgacgctgctgatcggcgcggccgaagtggtgcttcgccggtggcgcacactggtcatgcatctgccgctgctgctgctcatgggcgtgatgatcaccgcgcccgcgaacaatttcgagcggcatatgctgccggtggcgttcgtgttcggattcgtggtgctcacgttctggcgggagtcgcagcgggcgcggcgcaacgcggacatccggtgacgactggtgacgcttgcagacggttcggctatgctggacggtatgaccgatttcgacacggagcatggttccgttgactttcttgacctgctgagcagtggttccgctcaggatgacgccgattcccgcctggaatcggtggcgttcgcgtgtctggtcaatgggttggcggatgagcgtgccgcggcgattctggggattcttgatttttcggatgattttctgtgctttgccatcggtggcaagccgttgcacacgatggcgggcacaagggccgcgatccgcaggaccgtgcatgatctgggcggcgggccgtgcgtgacggggacgacgaacggtctgtgcgtggcgctgatcatgccgcgtgcggcggcgacgcccgatgtgacgtgtaccaatacgctgtcggcgttctcgacgaaggcgccggtgtgcctgggacctttgcgccgcggtgtcgagggtgcctgccgcacggtgcaggcggtccgttcggcgattgcggcggctcccgcattgccgcaggttccgcgcccgatgcgtgccgatgacgtgctgcctgagcgggcgctgctgggagatcaggatgccgtggacgagctggtgaatacggtatatgccagtctgcagacggcggggccggacgatcctactttggagaccgtgtccacgttcctgcgcaacggcggctcgttggagaccacggccaaggaattgagcgtacacccgaacacggtgcggtaccgtttgaagcgggccgccgaaaccaccggctgggacgccgccgacgcgcgcgaagcctacgtgttacgcaccgccatcgccctgggccgcatgcataccgcctgagcgcaccgcgactgaggagcgatgcaggtaacgcgccaccacacaatacacccctgaacacgccgcgatgcgcgcggtaccaagacgcaccgaaggaagcggtacaaaggtaccgcgactgagacgcaacgcaggtaacgcgccatcgcggtgtgttcaggcgtgttcagaagaggcgaagggaatcatcttccctacccttcatctcgtcataatcgaggatgaggcattcgaaaccgcggtcctgggcgaggacgcgggcctgaggggtgatggtctgggcggcgaagatgccgtggacgggggcgaggagggggtcgcggttgaggagctcgcagtagcgggtgagctgctcgacgccgtcgatgccgccgtggcgtttgatctcgatggcgacgtgctcgccgtcggcgttgagggccatgatgtcgacggggccgattgcggtggggtattcgcggcggatgagcttggagccggggccgatgcggtcgatctgttcggagagataacgctggaggtggtcttcgacgccgtccttgatgaggcctggatcgatgccgaggtcataggtggtgtcggagtagacgtggtacagggagacttccaagacgtcgctggtcttgtcggcgcagacgcgaaggatatgctcgggggcaggcccgtccgcgtcctcaacagagtccggggtgacgtccttcaaagtgcagggcgcagccatccagttgagcggcttgtatgagccgagttcggagaagatcagcagactgttgtcggcctttatgagcagaacgcgcttcgcgggaggaagcgacgcactgaggcgaccggaatattcagcagagcaatcagcaacaataacgcgcacgtcacaccagtgtacagtacgcgcggaggggagggagcgcctctcggaccagtaacaggcatgaaacgtacggccgcgccgacagcgcgagcgtatcgaacgccaaaatacgggttgaaatcgccgctttgagcaattccccgtgtgaaatcgccgtttcaggatccaaaaacggcgatttcacacggggaattgcggatttcggctatttcaacccgtattttggcgggagtggtggagtgcgccgggcattgacgggggataacaccgagtagataacacaaaaagggcgccgcctgcgggatgcagacgacgcccagtgcgagcgcaacggcacagccgctgccgtgccgaagagctcgctattcgataccgggtccttcagtgcggaccacatcacggccgcgttcgacggcaaccgtgagcttgttgaaatcgaaggagatgaatccgtcactgacctcgaacgcatggcgctcgcctgcgggatccacgaccgaaaccgtgcctcccttgatcaccgtgagcaccggctcgtggtcggccagaatacccatctcgccttcggaggcggggatggtgacggacttcgccgtgccgtgccacaccgggtgatcggcggcgacgatgttgacctgcatcagggcctttgacgattcagccatcactcaccaagttccttctgcagatcgtgccacttcttttcgaggtcgtcgatgccgccgatgccggagaacgcctgctccgggacgtcgtcgtaaacgccgtcgcagatgcgggtgaaggcctcgatggtctcgtcggccggcacgtaggagcccggacgaccggtgaatttctcggccacgtagaagttctggccgaggaactgctcgatgcggcgggcgcggttgacggtggtcttgtcctcttccgaaagctcgtcgataccaatcagggcgatgatgtcctgcagctccttgttacgctgcagaatggccttgacgcggttggcgcagtcgtagtgggcctggccgacgtaacgcggatcaaggattcgcgaggtggagctcagcgggtcgacggccgggtagatgcccttggatgcgatgtcacgagaaagctcggtggtcgcgtccaggtgggcgaaagtcgtcgccggggccgggtcggtgtaatcgtcggcgggcacgtagatggcctgcagcgaggtgatggagtggcctcgggtcgaggtgatgcgctcctggagggagcccatctcgtcggccaggttcggctggtaacccacggcggagggcatgcggcccagcagcgtggagacctcggagccggcctgcgtgaagcggaagatgttgtcgatgaacaacagcacgtcctggttctgcacgtcgcggaagtactcggccatggtcagtgcggtcagcgggacgcgcagacgggtgcccggctgctcatccatctggccgaagaccagtgcggtcttctccagaacgccggcctcgcccatctcgccgatgaggtcgttgccctcacgggtacgctcgccgacgccggcgaacacggacacgccgccgtggttctgggcgacgcgctggatcatctcctggatcagcacggtcttgccgacgcctgcaccaccgaacagaccgatcttgccgccctgcacgtacggggtcagcagatcgatgaccttgatgccggtttcgaacatctgggtcttggactccagctggtcgaatgccggcggcttgcggtggatgggccagcgttcggtgaccttgatggtctcgtcggccttcttgttcagcacgtgaccggtcacgtcgaacacgtggcccagggtcacgtcgccgacgggcacggaaatcgagctgcctgtgtcgtgcaccgaagcgccgcggacgaggccgtcggtgggcttcagggccacggcgcgcacggtggagtcgccaaggtgctgctcgacctcaagcgtgatcgtgtgcgcggtctcgccttcctcgtgagcgccggtgttggtcagctcgacggtcagggcgttgtagatatcgggcaggtggcccaccgggaattcgacgtcgataaccgaaccctggatacgcgtcacacgtccattgatcggctctgcagccgtctcgggagccgctgtggtctgattgtcagccatatgcgttcctactcttcctttgtgttcagcgcgtcggcgctgccgatgatttcggtaagttcctgggtgatggacgcctgacgggaggcgttcatcttacgggtcagcgagtcgatcaggttacgcgcgttctccgtcgccgtgtgcatggcgttctgcctgctcgcggtctcggacgcggccgcctccagcaggcattcgtgaatacgcgactggatgtacttcggcaggatggcatccatcaccttgtccaggctgggctcgaaacggtacaacgggcgcaccttggagctggcggcgttgtcgccctcgctctcgcgcgacatgcccgggccggattcgaccttggcctcgaccacttcgacgggaagcatacgcagcacgcgcaccttctgcaccaccatgttgatgaactcggtgtagacgatgtagagctcggagaccccgccctggctggccggcttcatgtaggcggtcatcagtgcgttggagatggcctcggcgatttcaacgcccggcttgtcggtatccccctcccacgtgtcggcgattgcgcggttgcggtacttgtagtacgtcacgccgcgccggccatacacgtagagttccggctgcttgccggcgtcgtcgagtcgcgtgagcagttcctcggtctcacggatgatcgacgaggtgtatgcgccggccatgccacgatccgccgtcaaggcgaggacggcaaccttggggttgtcctcctccttcttgacaatcggatgcgtgatacgggtgtgggctaccacagcctgaacggcatcgaaaatcgcatcggcgtacggcttcgcgttcagggccacgtcacgggccttggcgatatgcgaagacgcgatcatctcctgggcgttgaaaatcttctccagcgatcccgtagaggcgatcctgcccttcaatgcgagttgcgatcccatgggctacttcttttctccagccatcgggtgcttggtcggatcgtgcgcgggcttgtcggccttggcgatgatcttctcctgctccacgggcacgggcttgcgcgtcgaggacttcttcacgaccagcggcttgccggccttggtcacgtacgtctcgcggaacgcttcgacggcctcgtccaaggcggcttcggtgtcaggcgtgaagttctcggtctcacggatggtcttgaggatgtcggtgctgtgctccaggtaatcgagcagtgcgtgctcgaacggcagcacgtcgcccagcggcagatcatccatcttgccatgggtgccggcccacacggagacaacttcctgttccatcgaatacggcgagaactgcggctgcttgagcagctcggtcaggtgcgagccacggttcagctggttcttggacgcggcgtccagatcagacgcgaacatcgcgaaggattccagcgaacggtactgcgccagcgagatcttcagcgtgccggagaccttcttcagggccttggtctgtgcggcgccaccgactcgggagaccgagatgccgacgtccacggcgggacgctggttggcgttgaacagatcggactgcaggaagatctggccgtcggtgatggagatcacgttggtcgggatgtacgcggacacgtcgttcgccttggtctcgacgatcggcaggccggtcatggaaccgccgcccagatcgtcggagaccttcgcgcagcgttcgagcagacgcgaatgcaggtagaagacgtcgccagggtacgcttcacgccccggcgggcggcgcagcagcagcgagatcgaacggtaggcttcggcctgcttcgacaggtcgtcgaagacgatgagcacgtgcttgccgtggtacatccagtgctggccgatggccgagccggtgtacggcgcgatgtacttgaagcctgcggaatcggaagccggggaggccacgatggtggtgtactccatggcaccggcctcttcgaggctctggcgcacggatgcgatggtcgaacccttctgaccgatggccacgtagatgcagcgcacctgcttcttcgggtcgcccgtctcccagttcttcttctggttgatgatggtgtcgatcgcgattgcggtcttgccggtctggcggtctccgatgatgagctgacgctggccgcggccgatcggcgtcatcgcgtcgatggccttcaggccggtggacagcggttcgtcgacgggatgacggtgcataacgtcaggagcctgggcttcgaggattcgacgcccttcaatgcccttgatttcaccgagaccatcgatcgggttgcccagcgggtccacggtgcggccgagatagccgtcgccgacgggcacggagagcacttcgccggtgcgtcggacctcctggccttcctcgatgcctgcgaaatcgccgaggataaccacgccgatctcacgggcgtcaagattgaacgccaggccgagcgtgccgtcctcgaaggtcagcagctcgttggccatgcaaccaggcagtcccgtcacgtgcgcaatgccgtcgccggccgtcgcgacatagcccacttcctgggtgggggtgtcactcggcttgtacgactcgacgaaatcatcgagcgccttgcgtatcgtggcgggatcaatggtaagttctgccatgatcactccttattgttggaaaaattcatgtcgggctccgtcgccgcgtgtggcgcggcccggaaccgtatcgtcaggctttcgcctttaccgtgcggtgcagctgctggagctgggcgaccacggtgttgtccgtgacctcgtcgccgacctggatgcgcatgccgccgaggaccgtggggtcgacgaccgagttgatgtgcaccggatggtcgagcttcgcggaatatacggcggtcagtcgcttgatctggtcgatgttcagcggcgacgcggtggtcacggtaatcatcgactcgcccatgtggcgcgagaacttgttgatcagccactggatggtctccagatagcgccggttgcgcgggttgcacgcggcgtgttccgccagccggagcgtgacctcgttgaactcggtcttgcccagcacggcgttcagcagatcgatgcgcgccttggcgggcacgctgtcgtcattgagcttcgaacgcagaaccggcaggttgagcagcgcggaatgcagctcggccagttccacggacacgcgcagggtgacgcccgcggcatccgcgtagtacatcatggcgtcaacgccgaagtcttcgacggcgttggcgatgtgcgcggcacggctccatttgcgaccgaccagatcgctcatgatctccagggtcatgggatgggcctgggcaccgatgagctccttgagcacgccgatcttgtcgtcgaccggacgtgacggatcggtgagagcgcgttcgagctgcacggtgtggtcaagcacgttggtgatcgtgaacagttcgttgccgatacgccatgcgtccttgccggtcgagcgcagcttgggcgccaactcgtcacgcgaaacgcgatccgagatgcgggatgcctctcctcgcattggtcacctccctttccggaacgccggaatcacttcttgtcgttcgtgtccaggtcgtcgatcatcttgtcgatcatcgaggactgcacgtcgtcgctttcaagcttggcaccgagaatcttgccggccagggccgtggcaagagtaccgacttcgcccttgagggagaccagcgcctgctgctgctgcgactcgatggagcgctgcgcgttggcggtgatctgggcggcgtcggactccgcgcgggagcgtgcgtcggcgatgatgtgggaagcttcggcacgggcgtcgtcacgaatcttggaggcttcgacgcgagcggtgctcagctgggcctcgtacttgctcttggcggcgtcggcatccttcttggactgctctgccttggcgatgttgccttcgatcttcgccgcacgctcatcgaagatggcgttgaatttcggcatgaagaacttgtggaagaacagcgcgacgatgacaaggatgatcagggaccacacgatgtcgtagacctgcggaatgaacagcttgaggccgtcacttgcggctattgtcatcatgaagccctcctttcaatgtcgaataaacgtgtgaatcgtcgcctgtcgtctcacttaacgatcagggcggccacgaagccgagcagacccagcacctcgaccagtgcgaggccgatgaacatgatcatctggatcttgccgctcacctcgggctgacgggcggtggactccatcgccttgccgaacaggatgcccaggccgaggccggggccgagggtcgcgaggccgtagccgatgacggaaaggctgccggtgacctgagcgagagtaatgatgtccatttctgtttcctttctaacgtaaccgttaaaaaaacttggttaatttcttcagttgtctcgggaattgcaaagtattcgtattgtccgtggtgagtctcacgcgggtgcggctcattcctccgggtagctcatgctgatgtacaccgtcgagaggatggcgaacacgtaggcctgcaggaaggcgacgaacgcctcgaacagggtgagcaccaaaccgaagacgaaccacagcgcgccgacggggatgccggcaagcttattggtcgcgtcgatgacccagtactgtgcaaacgccaggcaggatgccacgagcaagtgcccggagatcatgttggcgaacagacggatggtcagcgatgcggggcggatcagcaccagctcgcacagctggatcggcgccagcaggatgtacaccggccacggcacccccttggggaagcactcgtcgcggatgtagccccacaggcccttctcgcgtgctgcggtgatccagtactggatgagcacccagaccgcgaacaccagcggcatgaccactgtggcggtggccgccatgttcatgccggggatgatgccgcacaggttgaacacgaagatcgtgaagaacaacgtcgaaatcatcggcacgtagcgcttgccgcgcagctcgcccatgacctgatatacgacgctgtcgcgcacgaagtcgatgcccatctcgaccacgccttgccagcggccggggatgagcttggcgcgcttcgccgtgataccgagcaccacgagaagcaccacggtcgccacgatgcggatcaatatgatgcgattgatcgcgaagggggtcccctggaacaggatctcgggaggaagaaaatcattgaccgttggcagttcgggaccgctgtcggccgccaatagtgcgcccgtaccgaccgcatctaccatatcgcgcctcctgctctcattatcagctgtcagtttagcccaacggttgaggcgaatgtgacgtttggatatcgtccgtccagccgttatcgaagctgcccgggcataagaccgaccaaccggagctcctgcccagacattccgctccgaatgactaagtgattatcctatgaccaccttggacaacacgcaacacgccttacttttcaagggctgtacggcgtttcttcgccaaattcgtgagcgttaacatattggtcattgtctcattatttggactgttttttaaacaccgctcataaggcatggacaaaagaggcggtattccacctattgagcacggcgatggccctcttttgtacgctatgtggacaccaaaccgtgctaatgcaacaaatctcgaatctccgcccaattacagcgggattccgaggtcatctgcaccctccagatccgaaagaccatcaacgggagccgaccgggatggtcccagacccccgtcaaacgaccgcagcgcaggcgagaaccatcattcgccacgtatcacgccgtagtcgtcatggacgaacggtgagaaatcgtccttgcgcgggccggcgggcgcgtggcggaaacgatcgatgccaagccggcgctccgcccgcaatccgggcacttcggtgagatcgtacggcgtggtctgatacacccagttcagccaattgcgccacagcagattcgcgtgcgatcgccatgcgaacaacggctcaaggtgcggatcgtcatgcgggaagtagttgtgcgggaacgggacgttgctcatccccttcgccatgtcgcgctcgtactcctcctggagcgtcgtcttgccgtactcccaatggccgagagcgaacacttcggagaaatcgcgagtggcgatcaggccaggcccggactgcggaccccaagtgagcacttgcaagtcgggattcgccgccacgtcggcctcgttcacacccgccagacgggagtgcggctgcagtgcaatctcgtcgaaaccattggtcaggaagcagtactcgtcctgcaggtactgcgggaacaccccgaatatcttctccggcaggtcaaccttgcgcacgccataccggtagttgagcgcccccatcgcgccccagcacaggtacatggtggagaacacatgggtgctcgcccagtcgagaatcgacttgaactcgtcccagtaatcgacctggtcgaacggcaggtgctcgaccggggctccggtgacgacgaaaccgtcatagtagttgtcgcggaaggcatccagcgtctcatagaacttgaccagatgatcgtgactgacatgggtcggttcatgggtggatgtcttcatgaagtcgatttcgacctgcagcggcgatttggagatcaggcgcagcagctgcgtctcggtttcgaccttcttgggcatcagattcaggatcaccaatttgagcggtcgcacacgctggcgctccgcctcgggcttctccagggcgaagatgcgttccgagtcgaggatggcacgcgcgggcaggccgcttgggatcttgataggcatgttcttattatggcaatggccgggatattgatacgccgtcaggttatcgccatgagttatgaccggttatcaatcccggcatttcactcagcgcaaaaatccgacacgccgatttgacaatctcgcattctcccctatcttagatagagctgtttgaaaacagccggcgcggggtggagcagctcggtagctcgctgggctcataacccagaggtcacaggttcaaatcctgtccccgctacgaatcgcgggaggccgtcacgaatttatcgtgacggctttttgtttcctagcagcattattgccgattggacgatgatgtcccgtgaaaaaacaacatccagccccactctgggcagaatctatcaacatgtggctcgactcactgaaggcggcgggctactccaccaacacgctcaacacgcggcgctgccagatgagcgcactgtcgcgggcgctcggtggcgacccgagggacgtggagggcgacgacctgctcgcccacttcgccggcaaggaatggaagcccgagacacgcaagggcgcgaagaacgcctgcgtcagctatttccgatggctcaaagcgtccggccgcagcgaggccgatccgagcgagttcctacccaccgtcaagcgtcccgaaccgcatccccggccatgcccggacgtggtcatactcaccgcactgcgcaaggccacggacagcgaacggctcatgctgcgtctcggcgcggaatgcggtttaaggcgcttcgagatagcgaaggtgcacagccgcgacgtcatgcgcgacctcgtgggctggagcctcgtcgtcgtaggcaagggcgacaagcaacgcatcgtgcccatcggcgacgacctcgccctgctgatccgctccgcccacggctatctgttccccggccggtggagcggccacgccgaatcatcctacgtcggccgacacctgagcgacctcttgggccacggatggacggcccacagcctgcgccacaggtacgcgaccacgacctacgccgccacacgagacctgctgctcgtctccaagctcctaggccacgcctcggtcgagaccacgcaacggtacatcgccatgcccgacgaccggctgcgcgccgccgtggaagccacacgcctcgccgcctaggaggatcacgatgttccgtttccccgacttgattatggtactaaattatggtaccataataagcatgatcgaatgcgaaccgtcagccttcaagcactggctcacacaaccacagatcgactacatattccggcatccggtggccgtgttcgaggtgcagtcgagacacgccggcgacagggtcatggcgatcctcggatacccggacgagttcagggaacgccccgtggagctgctggtatcccagcgcacccgcaaggtgttccacgcgatggactgccgccgcgaatggctctacaagttcgacgactaaaaacaccaaggaggacatcatgagcaacgaaacagactgggacgagctctcggacgaatacaccgagcacacccccgccatcatcggcgagaccatccgcccgcaaagggcgatcacgatggatgacatcgacgacatcttcgccggccgccccctcgccgaccagccccgccggaaggccgacgtgctctacaaggcatacctcacgcccgacatggacgcacgggtgcgggcacaggccgaacgagagcacatcggcaagagcgctctgattcgcaaggcgctggccgcatacctgaccgccaatcaggcacagcccgcgatggcctgacccatatacgacgaaaagcccccgaaccataccgtgagtgcggtaggttcgggggcttcttgttattcggtcttggatgccttggccttgagggtgcttgcgccgatgacgacgccgatggtcagggcgacggcgttgatggtcgtcgcggccggatcggcccatgtccagccccatacggggccgaggctcatggcgctcggcacggccagaagagtggcggacgcgctcgagatgacgatcgacgagttcgagtcccgcctctgacgcaggcatgcagaagcgcccctcgactcctatgcatggagccgagtggcgctacttgtttagaatctgccggtgttgaggcggctttggagtgcgcgtgcggtgccgggtccgaaccatgagtcctgcgcgacgccgaggtgtttctgcagggcacggatggtggcggggccgaggagcccgtccgcggtgaggttgagcttgcgttggacggcgcggatgaggttggatccgccgccaccgtagcgcacgcacgagtccacgagcgcgggtcggccccatgtccggccgtccggcctgtactggccgctgatgatgccgtccacgctggtgcccatgacctgctgccagcggcggatggtggccggcccgcaggagccgtctaccgtgagccggcccgtgccgccgctggatgcggtgccgccgccggacgacgtggcgctgccactgtaggcggggcgcaggatggcggcgatggtgttccatgcgcgggtgcggcgtgctacgcgcccgttgttggtgttgccctcgatggtctggatgtacgagccgtggttggcctcgatgaagccgatgtggtccaccacgccgccgtcccagttgaatatcacgatgtcgccgggtttggcgctgcgcgtgctgaccgcgcgggagcgtcccgcgctgagcacgtatggcacgtaggcggcgggcagtcccgggaacgcctgaccggcacggctcatgacccagctgacgaacatcgcgcagaacgggacgcccgacgcgccatagtatgagccgtgggattgggcgtaccagcgcccgtacttcgtgcccggctgcgggtcggtccaacgggaatagccgatttcgcccgccgcgatgcgcaggacttcactcgccgtcgccataggacacctcctcgatgggtgccacgtcagcggtcgcgtccgcgcccttggagtcggacaccgcgtaggccgcctgagctgtcccggtcgtggcgtcggtggcggcgtcggtgtcggtggcgacgatgttggctttgagcgcgtcggtgagctgctgtccctgcacggcggcaccggtcaggttgttgttgcgccaccacgcgtacacggatgcgatgacggcgatgacgccggtgatcgccgtgctcacctgatcggtggtgaacgggagctggctgatgccggcgatgctcaggccggtctgcgcgacgctgaataattggacgatgagcaggatgatcgccttggtgcgttccacggtcaggccgggaatcgccgggccggtggccttgtggtcggccacgccggtggtgtttgccataatggttctccttacaaaagaagccccacgggtgtgggacttaggtcagtcggttttatagaggcggacgctcagatgggcgtccgcgtaggtgacgccgaacatcgtggccggcatcggaagccaccgtcacaggtgctcccgcacggtgacgggcgcatcaacctactgggtgtcagcccggatggtcaatgtggccgtgccgggcttgacgccgttgatggtgatgctcatgatggctttcctcccagccggggcgcaatgggcgcattctggatatcgttgttgacctgggtgccgtggccgttgccgcccaatccgtgataggcgtcgtagacacgttgggcgcggagtttgaaatcattgtcggcgacgccgtggtggtcgtgcaccatcgtgtcctgctgctgttcgagcttgcacagcagcagcgtgcgcagcgcctcgtcgacgagtttttcgtgttcgcagccgcgcctcatgtcggccatcagctgctcatgctccgcccttcgggtctcctcgtcggcgatctgcgagcgcaggtttttgagttggtgccagaggccggcggctatggcgctgatggcggcgatgaggaggccggcgacgacgctggtgatgatgtcgtcagccatgtggctcctctctgatgggatgtcgcattggcgatcctctctgtgtgtggtggtggaatcccacggtgcggtcgagccggtcgagacgtttgggggccatccgacggccgcgcccccgccggaggagacgagcgcgacgaggacggtcagccatgcgggcgcgtccatctcagtgctttgccctgagcagcagggtgcatgggtcgggtttggcggtgtcggacgtgttggtggtggtgcacacccacttgcccatgagggtgtcgtagttgtattccttggtcctggcgttgcccgcgaccggcagtatcagataggtgccggcggtggggctggcggcgagcgcgatgcggctgccggcccggtcgtagacggagaagctgaacgcgtcgtagtagccgccctgggtggtgatgacccattggcggatgatgcacagccagatgccgggcgcgacctcgagcgcgtcgcccatggtggcgccgccctcgcccatgagcgtgctcgctgtggcggtgaacgcgctgatggtgccgtccgtgtcggcggtgatggtcgtgccgtcgggtttgacgacgccgagcgcggtgctggtggctttcttcaggccgatggtcgtgttttcggtgccgtggaactcgatgccgtcgggcatggcgttgtccccgagcttgaacgacagggcgaggtgttccccgttgcgggtgacgacggggaacgagcgcgagttcgtgtagtcgctgttgctgaccttgacgccgccgagggtcgtgtcgctcgcgacgggcagctcgtactggcctgcggaggcgtcgagggtgccgtcggcgcgcacggtgaggttgtcgccgggtttgacgacgccgagcgtggtcgcggtcgcgggcgtgcccgggtcgccggggtcgccctttgctccccggggcaggccgaacgcgagcgtggtgtcgccggccgcgtcccgggtggcggtgacggtggcgtccatgccggcgtcgagggtgcgggcggtcacgccggcgatccgctcgccgcgcgggatgtcgaggatgaggctcctgtcgcccgcgccgtcggtggacatgctggcggccgcctgctgggaggggttgacggtgttcgcggccacgccgatgatcctgctgcctcggggcacgccgaccaggagcgtgtagtcgcccttgcttccggcctgcagcatgctggcggtggcgggcttgttggggtccagggtggtggcgccggcgctggtgacgcccgcgccgcgcgggatggacaggtcgaggacgcgctgcaggccgctgccgcgcagcgaggacgtggccggctggttcgggtcgagggtggtggtgttgccgccggtgatgcgcgcgtccgagacggccttgttgatgcggatgatggccttgtcggcgtcgaggatgagctgttcgatccggccgagcttgtcgtccgcgtcgggtgatgtggcgtcgaagacggagcgttccacgagcccgtagaagttgcgcgagcacaccttgttgccgccgctgctgatctcgatgcccaacaggatgcgtccgggcttggcgagcgccttgcgtggcaccgccgcgcggaacgtggccgtcgccgcgccgctgaccgcgttcatggtcacgcggtcaccaaggtcgctgccgggactggtgttgtaggcgagcgcgcaggtgattccgtcggttgtggtgatgggtgtgccgttgtcggtgagttcgacggtgatggtgcggccgttgacgtcgccgctgttgaggcggacgtctgcgatgtatccgttggcgaggtcgagttggatgggttcgccggcggcttcgcggaagctgtcaagcgttgccattgtcgtcgtccttgttgagttggtcggtgagttgttggttttccttggcgagtatgtcgatctgggcttgcagggcggcgatttgcacggtgctgtcggcgatcatttcgcggagtttgccgatcatggccgggtggaggttcttgtcgtccatcagacgtgttcctttccgttgtcggaatgggtgagcgattcgatgaatcggtcggttgcgctgacgatgtcgtcggcgtgcgcggcaaggaggttgctgagttccgttgattcgacaccctccggcagagcgatggtcgtcggggtgtccgtttcatcggcggatgcgatggttgtggcggcggatggtaggggtgggaggccgagcagtccgcgcgttttgttgcggccggcggtgagcggatcgtcgggtgtattgtcgtcgggcgcggtggtggtgttgatggcgttttcgatggcgttgtaggcgctggtccatgcgttttcgccggtttcggggtcgggggctggttcgccgttgtcgcggacgtggaggatcgcggcgacggcttcctcgtcgctgtcgatgccgaggagtgtgcgccatgaggcgatcgcggcgagtggtatggcgtcgtggcgcatgtcgggtgtgggtggggtggtggtgatggtcgccatgccgtcggtgacttcggctggcggcgcggcgtcggcagtggtgagggtgcggtctatgaggagtgtgggttggccgttgatggtggtgatttgcatggtgtctcctattttttgaggaagcctatggtgttgaggtagtaggctttggtgcctatgtagaggttgctgtggtttacgttgatggagaggttggagacgacgccggtgctgttgttcttattccagtgggcggtgacttcggtgacgaccttctccggcccggtggatacccagacgagccagccgctggccccgcagtcggatacggtgctccagatcagcgcccagtcgtcgcctcggtggtccacggtggcgagcgccttgtaggagccgtattttgcgggattggaggatgtgaaggtgtactggctgtatgtcatgggtgcgccgctcttgtttacccaccatgccgtttggaaggtgtttcgtccgttgatgccgccgaggtagccgccgaggtacatgtatccggtgctgatgtcggcgaccagtccgatttcgccattggcgtcgccggcggtggcgtaaactttcgccttgctgccggtggctttgactcctgcgcggcaggtgtcggacggggaccatgcgtttaggattgcctcgccgccgtggccttgccgtgagtagaggtcgaggctgccgccgctgtcggtggtggagtccttggagtattcggtgttggccatgaggtacgcctgcgattcgatcttgctggtgtcgctgaggtacttgtggctccagaatcgtccgaacgcgccgggggtgccggcggtgcggtagccggacagcatggcgaggccgctcatgtcgccggtcttgttgctcctggagtacgaccatatgcttgggctggaggcataggcgccgtcgagtgggaagctgatgccgctgccgtcgtaggtttccgtgccgccgatctggtagctgtcgaagtcggggctgatcctgactcgtttgccggttcgggcggtctggaaggtaccgacgagcaggttgccggctccattgccgtcgaggtggacggtctcgttgccgttggcgtcggtcatgacgaaccggccggtgtcgaggtcccagtagttcaggcctgcggcgccggagagtcggccggtgaagattgtgtcggcgaagatgcccttgccgttggcgaggctgcggaagtcccagtctccgtttgccttcttgtggtcggcgatgcgccagtagccgccgccgatgtggatgcattgggtggggttctggtcttcgggcttgtcgtacacgtagatgccctggccgggtttgaggtacgtgtatccgccggtggcgttcatgatctggttgatccggtcgatgaggtccttcatgtacgggccggcgccgccggcggcgctgttccatgcgccggagttggagacgagcttgtccaaggcctgctgttgggcggcgaggcgctgcgtgtaggattgccggatgttgccgagggtgatcttggtgtcggcgaggctgccggccaggtcttcctcgatctggaggatgcggccttcgaggcgcaatggtgtggtgaagctggtgtcgatgatctgcacgccgtcgccgacgtccgtgccttccgcgctgaggccggcttgtccgagggcggtcacgtcggccgtgtaggagacgacgggcgtggtgcgggtcttgagcgcgtttttggtgagggtgaggagttccttggggtcttcgcagtcggggaagtccacgcttgcctcgctgtggtgtttggtgccgtcggggccgggtatgccccagttggcgagcgcttggtcgtcttggacgtagggtttgccgtcgttgacgtcggcgaagctgatcttgcggctgtatccgccggtggcctcgccttggtcattggtttgttcgatgcctttgccccacccgtagaggcgggtgatgacgtcgccgctgtcgatgtcgcgtttgatttgggtgaggtccttgccgtattcgaagcgtttcgtggtgttggtggagccccggtgttcgacgaggtggatgatgcgccggccgatctggttgccggtcgggtcgggctggtattcggtctggacttcgagcccgtaggtgtcggcggtcttctggacggcgtcgaggacggtgcagtggtagaatgcgaggtccgccgtgccggtgatggtgccggtctcgactgtgccgaccgcccaccgggtgccttcgagggctttggtcaggcaggctttggcgttcgccttgcggttgcgtttgtcctcgatgtacgtgcgcgagagttccgcgatgctgccggtgcagtaggcgacggtgacgggcatgcctgcggcgcgggcggtctgggtggactggcacaggtattccgcccagcggcccatcgagtccttgaacacgatgcgttcgtccttgttgatctcgccgatggtggtgatgtcgagggtgtcggtcgcgtcggtggctctggtgcggatggccttgatggcataggggaggtcgccgagcgggttgccccagcggtcgaacagcatgtatcgcattggtgctcctagatgagggtgagtggcctgtacgtgaggctggcgctggttgcgccggtgagggtgagcgtgttcaggccgggcaatagggggaagtagtcggattcgagtgtgggggccatgaggttgccgttgacgcgcagctcgcgcttgtcggggtcggtgatgatggtgatgcggccggtgatcgcggtcatgccagcgatggcgagggtgtggccgtgcgcgtccttgacgctgatggtcttcgcgccgttggcgggggcgatcgtccatgtgggccagcatggccggttgcctttggcgtggatcgtggtcgcccccgttttgagcgcggcggtgatggtgcggccgatgaggcagggatgggcgtcgatggtggcttgcacgagcgtggcgatctggtggtcgccggtccatttgtcctcccatgcgccgaggctcaaacgtccctcgtattcgccgggcaagccgcgccatgagagcgtgaccacggtgccggagagggcggcgaggcgggttttggcggtgaggatgtcgtcttcgccgccgatggcgtacaggttgagcgtgatggtgcggttgcccatgtatgcggccccggtcgggtcggtgagggtcaggtcgagccggccgtcgcggccgggcatgtcctgcatgctcaccgtcggcgcggccttgtcgatcgcgatgccggcggaggtcagggagagcatcatgcgttccagcggcgtgccgttgagcgtggggtcctcgacatgcggcaggcgcatgcgtcgctggtagagcatatgctctcctctctggttttaacggcctctcatggcgaggctgttgagttcgtagctcatgggtttggcgagcttgccggccatgacctcgccgccccgatcggacaggttgagcgtgatcccggccgtgagcgcctgatcgatcgcgtcgatgatgtcctgcttggtcgcgtactcggccgtatggtcgtccaccgtgtaggcgatccggccgttgccgacgacggccgagtatgcgagcggggtttcgagccggctggcgtcggtcttcaggctcacggtcgggaccatgtcggtcagtccgtcgatgctgtcggcgacgaggccgctggccttgtcgatgccttgggccatgccggcgggtatccatttgcccacttcgtcgcggaagatgcgtgacgggctgtggatgccgagcacgcccttggcccagccgatgaggtttttgccgagattgccgatggtgtccttgacccatttgaacgctccgccgatgccgttgatgaggccttggatgacctgacggccggtgtcgtacagccatcggccggcgccgctgaccgcgccgagcacggtgcttttgatgcggccgacggtgttgctcacgctctggatgccgttggacacggccgatgtgatgccgtgccagatgtttccgaggaacgagctgacgcggttccatacgctcgtccatacgccgctgatggcgttcaggacggtcgagatggtgttgcgcacattctggatgcatgtggacaccacgccgctgatcgcgttccagatggtggacaccacgccgctgatcgcgttccagatgctcgcccacacgctctggatcgcgttgaggacgttgccgatcgtggtcttgatgccgttgatgatcggcgtgaggaacgcgacgatgccgtcccatgtggtcgtgaagaacgatttgatcgcgtcccatgcgccctgccagtctcccttgaggaagctgaggaacacgacgatgactgtgcggatcgcgttcaccacggtcgagatgcaggagctaatcagcccgaagatcgtggacacgacgttgtagatcgccgtccatacggtgctccatacggtgttcgtgctgttcatctgctgggtgatgaacgagagtatccagccgaacacggtgttgatgccgttctggatcgcctgcaagggtgcgacgatgagcgcgccgatgacggtgaacacgttgacgatgaagtcgcgtatcccgttgaatatcgtcgtggcggtcgtgctgatgccgttccagacgccggacaggaacgaggtgatcgacgtccatgcgctggtgatgccgccgctgatcgccgaccacaggttggcgaggaattcgccgagcccgttccatatcgccttagcgccctccacgagcgcggcccatgtctcggacagccatgaggtgaacgcggcccatgccttgcgcccggcctcggtctgggtgaagaaccatgcgagcgcggccacgacggccgcgacggcgacggcgatcgcgccgatggggttggcggctatgacggcgttgaacgcgccctgcacggcggtcgccatcttcgtggccgtgctccatgcggtctgtgcggtcttgacgaggctcagccctccggccatctgtttgagcatggcgaccgggccgcccaggtccgtcatgagcatgatgccgttgctgacgcccttggcggcggtcgtcaccgtgttcatggttccggtgagcgcctgcagaccgctgttgagcgcctgatagcccttgactgcggcgaacgccgtgccgatgccgatgatgatgggcgcgagttccttgccgtgccggacgaaccagttgagcgtgtcggcgacgagtttgatgccgttggcgagaccgtctggggggatcatgtgcgcccagtcgatgaccatgttgacgacgcccatgatcgcgtcccgaatggtgtcccatgcgcttttgaacgcggtgatcgcgccgttttcctccagtttggagtagaggcgctggaaccagccgatgagcccttcgatgcctgcctggacgacgggcacggcgttggtgacgccgtcggcgatccagctcatgccgccggtgatggcgggtttggcggtgtcgagcacgctcgcgccgagcttgacgaacgcggcttcgaggttgccggtggctccctcgatggtgctggcgctggtggcggcttccacggcggcgtcggtgaagcccagggacatgatcgcgtcgttgaattcctgtgcggtgatctgcccgtcggccatggcgtcgcggaagttgccggtgtaggctccggcttccttgagcgcctgttggattttgccgcttgcgccggggatcgcgtccgagagctggttccagttctcggtcgtgagttttccttggccggcggtctgggtcagtaccatcgccacgcttttgaaggtgtcggccgatccgccggcgacggcgttgaggttgcctgcggcttcggcgagccggtcgtagttgggcacgccgttggcggcgagctgcgcggtggtgttgcggatgtcgttgaggtcgtagacggtcttgtcggcgtagtcctgcgtgctggcggtgagtcgtttgatctgcctctcgctgacgccggcgaagttcagtgtgctggcgaacttctgggcgctgtcggaggcgctggtgatttcgccggacaggcccatgaacgcttcgatggccttgcccgcgacgctttgcgcgatgccggtgatgacgccgagtttcgcgccgaagccgccggcgaagccgttgccggctttgatgccggcggtgttgccagcggtttccgatgcgctgccgaacgccgattcgatggccttgccgacgcccttcatgctgggcacgacctgcacgaacgcggtggcgatctcgattgccatgttatgcctccctgatggtggtgcgcggtgcggccaggtatgcgtttagttgttcgtcgtccatcgccatgacctcgcctcccgtggcttcatgccggacggtgccggggcgttggagttgtccgcgccagcgcgcgcccttgcgtgaggcttccttggttttcgtccaggcgaggaaggcgaggctgtcgcggatgtcggcgaggaggtaggtttggtcgtcccatgcgagtcgcgggttgattttttgccagatgatggcctggcggggcaggttggcggccagtgcggccgccaggttggcgggcagttcgcccgtccatatgaggtcggtgtcgagcccatagaaacgctggaagtccgcttcgagcgcgtcgggcgctgtggcgagcattcctatgagcgtcaggagtttggggcgacctgttcgaggagctgggcgatgaattcgctgaccttgtcgatgctcacgcggccggtgtcggggtcgcgcaatgcgtccttcatcgccgtgtaccggtcgccgcacagcttcttgaggaaggggacgatggcgaacgcgccggtgccgtctccggtctgggcggtctggaggtcgtagaggtattcgaccatgtcgaggtcgttgaagatcgcggggctgatggtgacggtgacgcccatgacctcgacggtcttgggctggtttttcggtgtcttgtggtcatgcggctgcttggctgccatatgcgtgtcctttcagagggggcgcgcccgccggacggcgggcgctgggtggaattcacttgccgagcgaggcggcggtgacgttggcgatgtattcgacgctggtggctccgttgatgaggtcgctcgggttggcgctcatggtcacgccgtagccgatggcgtcgccggcgctgtaggtggtgtcgtcgaattcggtgatggtgccgtcggcgacgacgatgcgcttgacgcgtttgccggtcatggcgatctcgaacacgagcacgaggctttcgccggacgggatggcgtggtagacggtgagcttgtctgcggtgccggtgacgttggcggtgccgaagcgcagtttgaggctggcttcgttggtttcgatcatgttgaactgccatgtctcgccgtagccgctgatctcggacagtaccttgatgccgcccatctcgttgatgtcggtggtgtcggtgtcggtggcgttggtgacgccgtcctcgctcaggtagccgacgcaggtgtatgcggtggtcagggcggtggtggcgtcggcgggcagggcggttcctgcgggcgcgtagtagaggcagccggtcttcttgggcttgccgaggctgacgtttttcttgttgttgtggttggtttcggccatgatggtgcctttcggatggtgcggcgtcgtcttattgggtggcggcgtcgagctggatggtgatctggtatcggggttggggcggcgggccggggtcggggaagtcggcgacgctttccacgctgacggcggcgatggggtcgagcaggtcgaggtcgagcagtcggggcagcacttggctcgtggcgagctgggcggcctgccatcggctttccgcccatgcctgcacggcgatggtgggatggctgctgtattcgttctcgttgccgccgacgcgctcgatggtgacgagcctcttgggtcggtcggcgggcacttcgaggtatgcggtcagcccgtcgccgtcggggtcggtgtcgatccagtccttgaccgttttttcgaggttgatgctcactgctgtttcaccgccttgagcagcgtgttgtgtttcgcgttgtcgaacgcggccgcgacgctgcctttggtggtggcgagggcgaccgcgccgtggtcggtggcgtgggccacggcgtggtcgtagtgggcgtttttggtttgggccagctcgttggccgtgtcggcgatgcgttttgcctgctcggtgatgacgtgcatggctccggcggattggcggacttggcggaagccggcgaggttgagtttgactttcggcatggcgtggtctcctatcctctggtgtcggcgagttcgacggtgaggttccatcgggtcggggtcatgccgcccgtgtaggggcgtgggtctccgatcacggtgtatgcgacgccgtcgatgaccgccttggccccgcgcaggctccggtagggccatgcgcggggcatgtggatggttttcgcggtgcggatgccgtcggggcggatgccgtcggtgaggttcgactggccgccgtcctgtatgagcacgtcgtccacctgttcctcgctgatgttccagatgattccgccgccggggtcttcgccggctttgacgcggtggatgagggtgatggtctcgcctttcatgccgcgcctccggccatgtcgtaggcccatgcctcgccgtcgccgcccaaggcctccttctcactcgtggtgaggtagaggtcgccggccgggttggcgtagctcaggctttcgctgtagctgccggcggtctgggtggattgggtgacgcccgacatgtcggggccggcctgcatggctcgtttgacggccatgcaggcgatgcgcttcaacgtggcgggcttggcggtgtgccactgcgggcaggtggtgcggatcatgtcgctcgcgtcctgtagcagcgtctcggcgcgggttcgttcggcgccggtgagcgcgtgccatcgggcttcgaggtcgccgacctgcgcgaacggcttctcgtcgtccgtttcgtcctctcccccgccgtctgacgtcacggttgtgccgtcggacaggttgagcggggtgctggggtatccgtccatgcggggtctccttaggcgagcaggccggcggccttgagcttggtcagcatggagttgaccttcgcgacgatggccgccgagtcggcggatgcggcgagctgcgcttcggccgcctgctggagcacgccgccgcgcgcgccggcggtcggcgcgggcggcgtgaacgtagacggcttgccggcgatggccgaccatgcgatggttgcgacgccttccgcgaacggggtgccgtcgggcttgaccagacgcacgggaatggacaggccggtctcgtcggcctcgtcgtgttcctgtactacgagcgtctgggtgaggggcgcggccatcacttgctcgccttgacggaggatgtggacttcttgagcacggcgatgcccttggggtcgaggatcgcgtaggagtacatggcctcggtgcggtaggcgatctggttgacgcccttgaggtccttgccggtgttgtcggggtcgccgtattcgatgatctcgctccagatgtcgcgcaccatgccccacttgatgaggcggaagtcgccgaggaaggcgaggatgccggtcgccggggtgatgaggccgccgttgaccgtgccggacgtggcggccgggatgccgtcgaggttgccgacctgaaggttgatcgggatttccgggtagaagcgctggccggtggagggaacgcggatcttgcgcagctcgttcgccatggtcttggacagggcgatgccgttgatgtcgtactcgtcgctgacggcctcggcgaggctgtcgatgtcggcgacgcgatcgtcggtggccggcacgctgaccgcgcttttggcgagcgcgttgaagccttcgagggtcgttttcttcttggggtcgaaggcgtggtagacgacgtagtcgaggacgcggcccatcgcggcggcctggtctgcctggatcttgctgatgatctccagtttggcgtcgtcgtcggcccactggagctcgttgctgaggcgggtggtggtctgcaccttgaagcgcttgccgacgaccggggtgagggtttcctcgtagctggacttctgcgcgccttcggcgacgacctcggcttcggaattgccggtgaagaccatgtagtccttgtcgaggaagagctggggttcgctcggggacagtgcggcgatggtgctggtgtccttggcgcgcttggtgatgacggtggctacttccttggggagcagcaccttgctggtgtcgagtgccatgatgatggtttcctttcggatggttggtggcggttagtctttgttgccgaagaggctgcgcacgtatgccttggctcgttcgtcggcggtttggccggcggggtgctgtgccgggttgggcacgttcggcagcttcggcgctgggtgcatgagcggtttgaggatgtcggcgtgcgcctggatctcctctagggtgctgccgcgcaatgcttcggccgggatgccggtcttggctgatacctgcgtcttccattcggcctgctgttccttggccttgtaggcggcgacctgcgcttcgagttcctgcgtgcgcttggcggccttctcggtctcgctcatttgggattccttgagcttttccagctcgtcggcggcggccttgttggccttggccttcttttcccagtcgcgcgagtggccgagcgcttccttgtatttggcttcccagtcggtctcctcgccgttgccgttcggtttggccggcggggtggggtcggtggtgtccgaaccgccttcggcgggcggggcgatgtatcggatatgggggtgctggaggttgaggaacatggttgttctccttgtgttcgggccctttccgggcattgaaaaagccacccgtgcgggtggctgaaaactcttggcccggttggcgggcatgaaaaagccccggcggatgtcggccggggctgggatcagtcggcgagcgccagtgcgatgaggttgcggctgggctggtcgatgtggtctttgggtttgttgtggtagaggcagtggagcaggtctgcgcgcagctccgtgtcggttagtgtgacgccggtgtcttcgatgttgaagtaaggggtttcgaagcgttcggagtagtcgagtaggagcaggtcggtgttgtcgttgtggtgttgggtgaagtattcttcttcgctcatgacaatgcctcctgaatcatggtattgaacattttagccgattcggggaagtagttggcgatgagccgccatgcttcggggtttgccatctgcgcgtcgagcatttcggcgaacgcttcggtggattggagttgtccgctttgccggaagtagcctttggggtggccgacgctgccgtggtagtcgtcgcctagggcggcttggagcatgtcttcgacgttgcggtcggtttttgcggagttcgtcgcgatctctcgggcgatggccttcatgacgctttgtcggcctgcgggcttgtcttcggccatgagggttgcctgtgtggtgtcgaatatgcgttgggcgtcccttttgagcacgtcgttgaacagtttgccgttgtgaggggcccatgagaacgagttcttgtcgagtagccagtcgagcatgtggccgctttcgtggaagaggttctgcactgggcggtgtgcgttgtctccggccatgacggtgtcgaggttgaggtggatgccgccgtcggagggactgaagcaagcgcctttggggagccgtgtttctttgatgtcgtattgggcggcgtatttggcccagagcctcgccgcgtctttgtgctcggttttgttgaggagccggttgacgcggcgggtatacgcttcgccgagttgttgttcgagtctgctgcctcgcgggatgcgcaggtctggcgcgaattccgatccgtcggtgaacgtgtccggcgattcgctgcgcatccacgagagcacggtgttgggatcgctgccggccccggccgctttggcggcgttctttgcctgctggtatatggccttgagtttgtcggggtcgtagccgtcgatctcggtctctccccacgaggggacgatcttgcagtcgcagtcgtggtggtacctgtgccacttgccggcggtgtcctcgctggcatagacgaagcctctggacgcgagcatggcgcagaacgcgcaggtcttgccttggggcactcgcgcgtatttggggcgggtggggtcgttctgggcggtgaaccgtcctgtgaggcgtgcggtctcgttgatgatgtccttggcgaggcgcgcccagtcgtcttcggtgtagccctgcgtgttgacggcccagaggtgatccatggtcaggccggctttgcttcggccgttgatgatgtcggtgaatttcgcgccgacgtgcatggtgttgttgtagccgccgacgatctgccagaaggcgcggtccgagctgacctgcgcctccttgtagtcgggcatgctgatgccggcggcttcggcccatgcggctcgcacgttcctgtaatagtcctgtgcgatgaggttggctttgcgcgcgtagtcttccagttggcgtcgggcttcggtggtgggatcatcgccgaagtagaggctgttgggcaccatcgtcttggcttcgatgatgaggtcggcgagctcgtcctgatagtcgtcccacatgtcgttgaggtgcccgttgaacgctttacgctgcgccgggctgaggttgctcagcggcaggctgttgctgtccattggctgcggcctcctgcgtgtcggtcttggcggtggcgatcttggcgcgtagttcgtcgatggcgttctgcgtgcgctgctgtttctcgtaggccctgtgggcggcgatctcgtcccatgtcaggccggcgcggctcaggcccacgtcactgtcggcgaaggcggggttggtggacgcgaccttctggtaccagtcggcgcgggcggcgtcgctggcttccttggtgggtgcccagatcggtcgcagttggcggatgtcggcttcgtccgcgccctgggcggcgagcgccatggcgaggatgcttttgatgctttcgccgaagcgtttgttttgccggtcggcggtgcgggagagtttgcgttcggcttcggccatggcttcggcgctgggggggttgtccatggtgatgccgaggtcgttgacggggatgtcggtttcgctgctgaccatgagggcgacggttctgagcatgtcggagtgcggctgcatcgaggcctgtgtgagttggcgcagttcgggtttttcgccgttgcggccggcggggatgccgttgatgacgctgacgatgctgccccatgtgtcggggcttacctgtcctttgttggctccgaggaaccatatgcgtggtgccgcgtagaattctgcggtcgcttccatgcgcacgagggtgcgcagtccgaggtcggtgagggccatgagcgggcgggtgatgcggctggagccgagggggcggtagagctgctggtcgctgatgatcggcacgacggtggggtggtcgaagccggtttcgatgcgttcggcctgccatgtgccgctgttgcggcggcacaggtagaccttgcctggcagccatacgtcgaagcgggtgatgtagccgtctttgtctttgtcgcggatggtcatggccgcgccgatcctgtcgttgccccagtcccatatggcgctgctccagtcggcggcgcggggcgtgatccgtatgtcgtcgccgtcgccggagatggtcatgaagctgcatccgtgcgtgtatgcggacacgatggcctgctggattttcaggccgaacgtgttcgccgcgatgatgtcgtctacctgcgtttggagggtttcgggcgcgtcgatgccttcgaacacggaaaggtcggcgagcgcgcggacggctttgttgggccagccgatcattggtttggcgagggctttcatggccggcgggatgctgtaggcgacgcctttgtagtggtagtgggcgaggtagtagctggtgcgcagggtgttgcgcgtgtagtggcgtcgccattgtttgaggagttcgttgatggtgggctggtcgtcggggtccactccggcgatggtgttggcgtaggcgctttcgatggcgagccagccggcttgtccgcgcaggatggggacgtcgtcggtgttcatgattagtaccatgcttcctgttgtgcggtggggtctcttctggtggtcatggccccgtggagggcgagggtgacggcgttgagcgggctgatgtcggtgtcgtcgtcgggtcggttccatccgaagaggccgtttttgccgatggggcgtgtggtggctttgctggcggcttgccagagtggttgttggccgtcttcgggcaggtgggtgagggtgccgtctctgagcatgtcctggaggcggccgcaggcgcggcccatgtcggtggcggcggtgacggtgacggtgacgccggcttcggcgaggtctggcaggagcgcggtggcggggctttgcccgtcgatgacgagcgcggcggtttgttcccagaccttgtcgatgaggttgacggcccacatggtgccgtcgtggttggtgtccctgtattcggcgagttcgatgtgggcggtgccgtcgtcgtagcgcatgcatgcgccgatggtcaggcgtgtgcgggtggggttcatgtcgatgccgaagctcatgacgccgcctgggcggcgtttgtcgatggtggcttcctcccattggcggcggtcgatggcgcggctgagggcgtgttcgtcccagatgccgagggcttcgcgccggaagtcgtcgccggtgaggttttcccacaggttggcgatggattcgtcgctggtgtgggccgggtagctggggttggctttcctccattggtcgcggtcgagtgggtcggcgtcgcggtcggcggtgaattcgacgtagagggtgctgtgggtgcggccggcgcgcgttttgtccctgaggcgggtgaatgcttcgccgttgtcccttgggccgggcggggtgcccatgtagatggtctgggggttgtaggcgcggttctgggtcggcagcatcgacgccatcgccgagtcggacaggtgctgggcctcgtcgatgacgagcagggcgatcttcttgacgcctcgcaatgcgccgcgttcgcgggcgcggaagaagatacggctgccgttgcggaagcgtatctcctctttgccggcggcgaggctgatgccgtggtcggggtccacgaggccgctcatttccggtctgagcacgatggcgcacaggctttcgaacgtgtccttgatgacgctgaagtgctgggcggtccatacgatgcgcatgccgggggttcgggcggcgcggtggatcgcgacccagccgatgtcgtaggtcttgcctgtctggcgcgggatcgacagtacggcgttgcgggcgctccagaagccgtcggcgcttttcgcgaggatgatccggttgatctgccgctgccagacgtcgaaccggtcgcccgccgccgcggcgagccggttgaggctgggttcgccgctggtgtacaggtcgtcggggatgatctggcaggccgccccgtcaatcctcgtgctcatccaatcgtatgtcctccgtgtccagggcctgcatggccggatcatgctcgttcgacgccttgtcgatcgcctcgatctcggcgctcatgtccgccaagcgtttcgtcagactggcgaggtcgcgtgagcttatcgacccttcgtcgagcttttcggcgatcaggttgcgcatcgccaccaggaggcggcgacgatcaccggaagcggcggcattgctgaccctatgggacttcgacgcgctcttcgacctggtggttttcggcgttctggcgaccatgacggctccttgccaagtgtggaaaaagtccgggggaaaaacggccctttgcccgtggtggccgtcagggggccgggtgggggctactccccacccccgaaccagtccgagcatcggatcggctggcttggagccgtggtgtcgtcgtgtcgcggcgcctcgccgtgggcgatgaggtaggcgacgcgctcgcgtgcccatgccagaccgtgcgtgcctttgatggcgttgcaccatcgatgcgccggaccgctgttgtcgtgcgtcagggtgccgcctcgcgccaagggtatcgtctcgtcgatcacgaagctgtacgggtcgggcgaacgcaacgtgtagtcgatgggccgatagcagatgtagcagtcggcttgcatgtgccgccaccgctgctgctccagcctgcgccgatgcccgttgcgtttgcgcgggttgccgctcacttgagcctcggcttgctgctgcactggctgacctcgacgccggccctgaacacgatctcgtcggcgatcaacggcacccacacgatgcccagatcgtcacgagaaacctccagatagggctgccggtcggccatcgcataggggaagatcacgccatccacgagcacccgccccctgcgggcgtccacttcgatacgcttgggatacaacgccatgacacgcctccaatcgaacgcccacacgaacaacaaacggcgcccgccgtcgggaagcagcgggaagaaccgccggcgagacgtctgtctgcggtggtttctcgggtgccgcatacgccggttatgcacggtgccggcggcggctggcggatggcgcgggattcgaacccgcgaagcatgaggcttatcatgcttgcccgcctagcaagcgggtgccttcggccgctcggccaaccatcccggatatgagaaaagccccgccggcatgggcagggcttttcgatactccgattacacgcgacagcgtaacacggaaccgggtcagggttcaagcgtcgcctgcgtcccacgcgtccttggcttgggcgcacgccagcaattccagaatgttccacgcccaataggggccgtcgatgtgccgcgtgcggggcattttgccgcgcgtccgccagttcttcaagtcgttgccgctcacggcgacgccagtgttctccctgacccatcgggcggcgtcggattgggtgcgggtgatgtgcatgaggcccgcgcggcgcaggtattccaaccgcacgcgcttcagatcgagccatgcgccgcattcgggacacaccgcataccgcgcggaatgggcggcgtagatcggcgtgcgcaccggttccccatcatcccccaacgtgttcaggcagtcggggcatacgccgacaagacggcgctcgtcggcccgcgtggtggcggtttcgaccttttccgacagtcggatcaggtcggcgtataggtcgccggccgtgtcgagtcgtgcgaggtcgtgcatgtggtgcagcagcaggctggtgatgtcggcccattgcatgagggtgcgggggcggccgtatcggtcgtgtccgatcggtttgacgccgagcatgccgccggtgagttgcaggtgcgtttccaccgtggagtagagcgcttgggcggcttcgttgaccggtggggccgcgtatgccgcgttgccgtggcgtggcgagcgttcgcgggtggtggcttgtttgtaggcgatctgttggagggcgggcatgccggccttcaagagccatgcgaggcgtttcgcccagtccttgacgcattccttgcacaggttcgcgtcgccggccggtttgccgcaggccgcgcaagctcgttgttctatcatcccagccctttcgatggtgctatactcacttgttggacaatgcgagcctctgccgaaaggtgggggctttttactttcccataaagccgttcccgccgtggtggatgggctgggaatggcttgtttttcaacggtttgctggcgttccttaactttctcttctattgtcgccgatgccggcgggtttttccagcgcgtaccgtggttcgaggaattcggggcgtttcggctgcgcgggtgccgggtgggcttgcaggatgatggccttcacctcgtcgatggggatgcgcagggattgcgccgtctcttcggggctgacgcctttggtgcgccagtcctcgatgatccgccggatgccgtcggtgactctcacgccctcgctccttcctgatggtcgagttgttcgcgggccgagcagtcggcgcacatccgggcgacgcggcgcatgcatttgcggatcgcggcattgagggagagggcgagcacggtgaaccggccgaagcattcctggtgcgtcacgtcatggccgggtgcgggggcggcgcacatgaggacgaccggcccgatctggtaggccgtgacgtcgatgtctatcttcttgttcatttcctgtcctttctttgtctgctcatgacgccgtattgccggccgccccatatgccctgcaacgggtagccgttgatgcggctatgcccatcggcccactcgcggcactcgcctatgaccgggcatgaccggcagactgcgagcgccgttttggttttggatggccgggtgctgaaccagagttcggggtcgtggccgcggcatgcggcttgatgtatccagttcatgggttatcggtctccgtcgcggtaggggttgatgtgtcgggcttctttcatggcgtcgaagcggccgtagcgtgcttccatgagttgtttgccttcctcgtaggcttggatggtttccgggttggtgcgggtgaagggttccacggtgtcgctgatggcgttgacatgcacgttggtgaagccggcggcttctaggcgttgctggatggtgagtgggctgtgggctggcgtgtgggcggtgaagctgacctgcattattcgaggttcctttccgtgagtcgtttggctatggtctcgccgagcggggtgatctgccatcttccccatgtgacgtgttcgatgcagtcccgcacctccaatgcctcgaaggtgcgctggtggttgcggtcgagcgggtaggcgctgccgttctgccagatttccaatagcagttctcgcatggccgtggtgagtctgatccgttcgctcatgtgaggtctcccgtcgtgtcgtcgagcacctgacaggtgatcgcgtcgatacgcccgctggttttcacggtcaggcacaggcgtttcacgtcgccggtccgccgcacctcctgcgtgacggtctgcgcgggctgctcgccgagcggggcctgttcgccgagcccgtagccgacggccagcgccgcggaactagccacgatgatgggcatgatcccgacgatcacgggtctaccgttccttctcactgcattgcctccattccgttgataaaactccatgcgctcgcagccacttgtttccaccattcgagctcgcggtcggcgatgcgcttgccgctctcgtacacgatcgggcgctcgccgttgtgttcccagaggttgagggcgagccggccgatccatcggagcaacgcgagggtaaccgggtcgcgaaacttgccgtcgatgaggctgggatgcgccgagtagatgatcgtgcaatcgctgtcggttttgatggcgccgagactgacggtggtgccatcgctttggtcgcacatgatcctgatgctcgtcatgcgagcgcctccgtccgtgcggccatgatcgccaacagcgccaaccgccgatactgctctttcgcgtccgggttcaacttcggccacaacggctccacttcctcgaagcccatgcccgacgtacccgtatagacggcgagcgccgccgcgtcgatctccctatcggtgatcttgcggcatacgccggccctgtacgccttgcgcgacgcgaggcactggccgagactggtgatgccggtcgggcgctcgccgttgtctgggtaggggtagcgttcctcgatctcgttggtgatgatgctcatcgtgttccctccatcgattcgtatgcttcaagtacttccgtcaggcagcgttctttgatggaggtcgtttggatcagcgggttgtttccttgcagcgtggcgtcgagttgtgcctggcgtatgtcggcgagctgggtttcgagccattggtggaagctcatcgtggttcctttcctgtgtggtcgtcggcccttgtggtggtgtgcatgcttaccagtccttttcgagttcttggcagtcggggcagatggatgacgtggtgtcggtgagcggtgcgccgcagatcgcgcagatggtcggatcgttggccggttcgggtcggtgggctgcttccaggaggcggcggatgagttcgatggtctgcggggcgggggttgtggtgtgggtgctcattgcttgtccttgagtttgatgtgttcccagtcgcatgacgctccgccggagtcggagaagcatcggacggccgcgctgccgtcgggcagttcgtaccagcggacgtatccggggtcggggttgttcacggtgccctggccgcagcctttgggtgtttctccgcatgccgtgagcgcgaggatggcgaggatcgccgtgagggttgcgggtattcgtttgcgggggttcatgatcgggctccttggatgccggctcgcatgatgtcgaggtagttggcgtagtcgttgcggtctcggcggatgcagtcttggactcggtgggtgcctgcgtggttttggtaggggttgtggtcgagggctaggtcgctgatccggtaggtgctgaggtcgagttttctgtggttggtgagctggcggagccagtcggggtggagatgggggccgagttggttggtgagtacgtcgatgtcgtagtccacgttggtgccggccgggtggagcacgtactgggatgcctcggtgtcgagccatgcgccgaggttgcgggcgacgttcgcgtatccgaattcttcgggttcggtttccatgacggtgtccaggagcccgttgtcgaggtgcatgcgcagcaccttggggtcgatgtcgtagaggctgagctggtcggggcgtaccgggcagatgaaccggtcgtgttcctcgatgccgtccatgctggtgacgatcatgccgatctccaggagtttcgcgttggtgcggctgatgccggtggtttcggtgtcgatccagagcagcatgtgtggtttggctggcggttttggcgggttgaggggtttgccgctgacggtgatgtcgtgttgggtgttcattcgttgcctttcttgatgtcgatatgggcggggaggtcttcgggtggcgggcagggatggcgtgtgccgtccgcgttgagctgctgccagccgcctgtgcggtagtagacggggatggtggcggggtctttgcccatgtggacgaggtagccgagctggtaggcgcgcttggggtgggcgtgtacccatccgtggcatcctgtggtgccgctgccgcagagttggagcaggttttcgggttggtggagccggtcgaacgggtggcttcgcggttccctgtggtggatgctgtcgccgctccagtggctgccggtttcccggtcgcatatggcgcatcggtatcggtctcgccgttgtacggtgcggcgggtttcgtcggtgggtttggtgctcatctctgggcctttcgttggcattcgttgatgatttccttggctttttgttccgggtcgatgccggtttttacgcaggcccagaagtcggttctcatcgcgtcggtgaaggtgccggccggtacgtggtctcggatgtggccggtgatccaccggtcgtcgatgacggtgccgtcgggcagcgcgtgccggtagggtttcggccggctgggcatggtgtccatgtatgcgccttggcgcagccatcggctcatgttgggcgcgtatttgggttcgtcgatggttttggcgtaggcgatggcactgccgatgagctgtctggggtcggccggcggtcggccgtcgacgccttggacggcgaggttccacgccttttcggcttcggttttgctgccggtgtggcgtgggtatgcgttccatgcggtctcgaatgggtcttcgagcatcctggcctcgagttcggccatggtgacgcgctccggctccgactcggacaccggtgtcgacgtcggggtcggcgcggaggggttgggggaggttatatcggtatgggaataggtataggtaagggtgcttcgtttttgcttgccggtttgcttcgcgtttgcttcaccttttgcttcggcaagtgcttcaccttttgcttcgtccggttgaagcatttgcttcgcgtttgcttcactgtctgctgaagcatttgcttcgtttttgcttcgtctcgagcggccggacgccttgcctccggcacggccggcgcgggcgcgtttttcctgtagttccttggtggccgcgtacttgcagagcatggtgccgtccgggttggcggcgacgatctcgaacacgtcggactcggtttcgcgccacaggccggcgtccacgagctggcgggcgagcttcgggctgccgccgagcttcctgacgcgctgcatggtgatggccccgtcgtagtcgccgtggcgcagctggcgtccgacgtagctgccggcgagagcccacaggccaatcgcggacaatggaagctcctcgcattgcgggctgtcgtagatgccgtcgtcgatcatgaaccaagtcatggtgaacctctctcaatgtgtggttacttgatctcgccggtgttcggatcgacggcctctcctccgtcggtctcgtcagcatcgtcgtcgagatcgggatagtcgggcgcgctttcctcgaacgtggcgaggctgtcgtggaggttgtcgtacaggaccgcgcggcgtgcgtccttcggataggtgagcagccggttgatgacctcggcgcagtcgatgatgtgctgcgcgagcacgtccgtgtcgtacacggcctcggtgtacgggtcgatctgatggaacttgtcgaggtaggcgtctttggtttcgagctgcatcttgtggttgaccgcgcggcggaagtccacggccgcctgcttgatcttcgcgcacgagctgttgaagtccagcaggcccagcgggctcatctcgtcgggtatgagcgcgtcctgaacaagtcccgagtcctttttctttgccatgagggtgtcctttctagaattccggttcgccggcatcggtggtgaacgtgtccggcgtgtagccgctaccgccgttggcccacgggtcggttgcgggcggctgagacggcgcggtggctggccgtgggccgacgggcgggttgcctgcggggttgccgtaggtgctgccgtaggtgctgccgccctgatagccgttgtggccgccctgtttcgtgacctgcgcggtcgcgtaccggaggctggggccgatctcgtccacggtcagttccatgacggtgcggttcgagccgtcatgcgcctgatacgagtgttgggagaggcggccttgggcgacgacgcgcatgcccttcgagcatgattggctgatgtgcctggcgaggtcgttccacgccgagcagcgcaggaacaacgccgtgccgtcctcgtactgctgcgtccggcggttataggtgcggggcgtgctggcgatcgtgaacgacgcgaccggattgccgtcggacagggtgcgcagttcggggtcggcggtgaggttgccgatgatcgtgatgacggtttcgccggccactagtcctcgtcctccatgtcctcgatccagtcgccgacgatcgcggcgagggcgtgcgcgtcctcggctgcgccgctcgcgatgccccatgccacgtcctcgcggcggccgtggcagtgcagggcgaggtcggagagcgccacataggccatgtcggccacgccgcgcatgtgccccagctcggccagggtctcgtcgtctccctcgtcttccccggcgatgtcgtcggtgcagccgagcagccggccggccagctccttcgccaagcgttcctcaagcgagataacggtcatttcatgattccttcatctggtagtcggccttgatcttccacatgcaccgcgcggtgatctgccgtcggtcgcggtcaacgaccacgtcgccgacacgcgggaataacagcgtgcgatcccactgcgggtcgctgttgagccggcggatcgtgtcgatgagcgagtccaggagctcgccggcacccatgtgcaaggcctcgtcggtcaggggccactcgaacaggctgcacccctcttccctgtagtcgtattcgtccggtgacggctgtgatgccatgcgtgttcctttccttgtgcgcggagtatgcgggttgcggtcgcgctggccccggtcgggacggcctcaggagtcgaagcctgccgtgtccatcgctccccgctcgcactggcgttccgcgtgtcctgtcagtggcgtgcgagggggcgacgttgacgcgatcgcagtggacggcggccgaatcgaacggcttcccggtctttgcccgcgcccgcctgacgcgaatctcgaccgggggcgaacctgcccgcccttggtgcgtcgccggtggagaggaccggcggcgcgatcattgagagaggtggtgttaacgacttgttccttgtcgccgcccgccatattggaagggaatgcaatgatggcgggcaagtctcatatggtcagcacgagcgcgaccatgccggcgcgccagaacgtgcgagccaacgtgtccgacggcttccgactcgcctgagacgggtcgatgagggcgatgtccgcaagctcggcgagcacgtacaccgcgagtactgtccactgctgccagacgatcccgctcactgttcgtctccctgctcctcgacgatggcgatgaacagggtcggcacgacgaggaacgcccaccacgcggccagcccattgccgaacggatgcatgcaggcgtcatgggtgaacagccacacaatgcagacgatgaacgatatgacggccatgaggccgatcgtgtacgggtagcgcttgaacatgacgccgcccttacttggtctggacgagcgtgtcagcgccgtccgggacgacgacgagctgatccgcgttggacagagcgtcgatatagtgctgtttgagcacgttgtcggtcaggctctcgttgagcacggcgttggcgtcggcctcgccctgcgccttgatcttcttggtctcggcctcggtcttggcgacttcctgctcgttcatggccttctgcttgtcgatctcggcggcctgcgcctcgttgtatttcttgacgatctcgtcgccatagcgcacgtcctgcacgctgacctgttcgacggtcaggccgatcttcctccacttggccgccagcgcatcttgcaccgccttcgtgtattcgcctcggttggtgagcatcgtcaaagtgtcgaaccggccggactgttcacgagccacgctgcgaagatcgttgctgatgtagttctgcgtgaacgtctgctgcttgccgtactccgagtacaggtattcggcggcgcttggatcaaggctgtagttgacctgaatgtcgatgtctgcggaagctccgctcctgtcgttgacggtgacttgcttgccgaccgcgctgccgccgtcgtacttgtaatcggtgtctttgtagaagttgatgaggttgttgcgggtgtcgtatttgacgatgctctgccacggcgtcttcaaatggaagcccgcgtcttcggaatggccggccagactgccgcccatgttgcggatgaccgcgacctcgcccacgtccacggagtacaggcatgcggggatcagcagcatcaatccgacgaggcccggaatgaggccgatgccggcccccttgacgttgttggacagcgcgatgccggtgacggcggcgctgaagagcagcaggacgatggagatgacgaaccagatcatgagggttcctttcagaggataaggccctttccccgtgccggtaggcttgaggtgccaaccaaaaatccgcacgacgcggggaaaggaagaattttcaatgcagacacaacgagaggcgcttaacgaagcgctcgacaatctccgtgtcggaaccagtagcgccgcttggctccgggatcatgcagaaagcgaagaggtgaggaaactcgcccgcgccgttcattacatcggcttcggcgctcagcagatcgccatcgccctcaccgaccgaaacaagaccaaggacttgtaggagaaacagggacaccgcgtcgagctgtgccagaagcgcacgcctgtccagcttctccgagattcgcctgtattcggagtcccccagtgcctcgcgcacggcagcctctgaatacagggacgctttcatgcgcagcatgccggcgtcctgaagattgtgctgcaacgtctccagagaggacagcaacgcaggttcacaattggacttgctcatttcgccgcctcttccggctgggggttgtccgccggccacgggtcaagagtgcgacccatgagatagtccacggacgtgtcgaagaagtcagcgagcgccacatagtccttcttggtgaagctgcgagtgccgttgatcttgctggacagtgcttgccgagtcagcccgatctcgtcggcgagcgcggactgtgtcatgttccgcgtatcgagcaagtcgagcacgatttgtgctgtcttgttttcctgtgtttgtaaccgcatgtgattacagatacaccattgagtgacagagttacaaatcgtcggcgtgttgactttgtaatcaaaagtggttatagtgatgccatgaccgaaacactgacagccccgccggcggtgatcgactaccaagccgtagccatcggcaacataaggatgatgcttagcctgagagggctgaagcaaagcgatctcgccgcatacatgggcaagcatcgccagaatctgaatcgaatgattaacaccggcgcacaatggtctttcaacgacatgtgccgtgctgcgcaattcttcggtgtctccattgacacgctgatgcgccctgaccttactcaatctgagctaaaaggaaacggaggtttgcctgtcgtcaacgttgacgacttccgcctacgtggcggggcgtggaagaccccggctatggttctggccgcctgaccgggcggctcgggatcataacccagaggtccatggttcaaatccatgccccgctaccagtgcctccggtttcacatcaaggaaatcggaggctttttctatatcatccatgttccatcgggtgcgcccactgaacttctgggatagagtcggcgcggcaattcccatagcctgcgccagatccttctgagaggtctgtcgaatggcgataagaaccttcatgttgtatgtaacgcgatcctgaaggctcaactcttgcttctgcgcctttaacgccggcgagaccatcactgcagtcatgtgaactagattagcaatgcatagacttactttcaagtcttggattaggaatttacaaaccatgatattgttacacatatcttttatccatacataaaactgatttgtatataactaatacggagtcgagaatcaaaaccctgatcgtagtacgcggaaggccgcgatcttgtcgaccggcgcgatgcctccagtgacgctgaccgccccgaatcccggaaacgacgatgtgcgccacatcgtgctcgggatgatcgacggcaggcattggacggcgattacagccaaacgcggcaagcgcatccgcatcatacccgtgcaccgatcgcgcaagaacgaggaggcataccatgaaagccaaaaaatgatgccaaggcgatcaccagcgaccagtttgaggagatgttcgacaacggcgaggacatcctcagctatgtcgatctcggcaatcccgtagtcgaacatcatcccccgctggagaagcgaatcacgctgacgatgcccgcatggatggtcagcgaactagacgaggaagccgccgagctggcaatcagccgcaacgccgtcgtcaatacatggatcgccgaccagttgcgcaccatgcgacgtcgcgaaaacgcccacgcctgacccatataccattgaggcccatggttcaaatccatgccaaatagaaggctaggaattacaagattcctagccttcctgttctattgcgcctttctcaagtgcctcaaaccatccaccggtctcgctagacaaccttcaccagcggcagcgtcagcgacgggatcggcggcggaaggccagggcaccgatggcggccgcggcggctccggatccgacgacgatgatggcgacgacccccgcaccggtatgagacagcaccggcttctcgggctctggatccgccttcggctcagcgggtggatcatcaggcgcttcgacggttacggtctccccttcgacgccgagctcatgcgaaaccagcacatcaccgtcacgcgagcgaagcgacgctctccaatacaccagtcccgccttcggcgagcgcacctgcggactgacgatcgtctgctcgaacagcgtatggtccacttcggcgcgggcctcgtcaagcagcacgccgttcatgccgggcaccgccccttcctccaccgcctcgtacgccgtgaacgtcacataggccccttcgggcacatcgcccacaatccgcgccgtatcgcggaacggctcatcgacccgcacaatgtccggctccacctgcgtggtcagcgccggcttgcgcggccgtgccacatcccatatgcgcacgcgctcccacgcgtcatcgtatgcgctggacgccggcatcacccggtcatcgccgtcgaagctccaaacgaacacgtaccatccatgcgattcggccacgatgtgcaccggatcgccatgagcgtccggcgccccggcgcccactcggatacgcccgttgaccgccggataatcccacacgccaatcaaccggtgattgctgtcctcggccggcggcgtctccccctgaggccggtacgcctcgtcgccggcggaatcattcggatcgcccgcccaccacacgctcacctgcgccatcgcccggtcagcgccgatgccaagcttgacattgccgtcaaaggatccgtgatcatcggggaatccgtcgaccgtaatggtgtcgctcagttcggaaccaaccacgccggtatgctccgtgaccgtagattccacactcacccgagcacggttcgaattcgtctccgtgtattccaggaacccgctgaccacatccttacctatatattgtcgcgcagtatcgctcaacttctcgacttcgaacgcccacacccatgtgccgaatcctccacctcgcggcgcctcatacgccgcgtcgccgcccggctcggccgttgctctcacatccacgcgctgcccgggagcagtgaacgacgcctcgccataagcggacggccggaatcccattgtgcccagcctcgcgatgaactccttcgccgtctcgtcggcaccaggcatgaccggctcggacagatcgcccacgacgagcccgtcgaaataccatccggacgcccgcaactccaatccggacgcccaggaatcgccgtcatccaccccggatgtgacggtatccacgaccggctgcccggcgtcgaccaccttggccgcgacggcggtgcccagtgtgggcacgaactccttgcggaccgagaaattcaccgccttgccgctcacctgcgaagagccgccgtaacgcaccagatcctggcctcccgcgactgcgaacacgtccacctgcttgcggtcatatgccacactcgccttcacttcaccctcgccggtcgccttccacgagtacacgatcggctccgccccggatatcccggtcaccgtcgcgctcccgttcgcgaacaccgccggaccgttcagcgtcgcggcgtatctgatcccggcgatcgtcttcccctgcgcattggtcaccgacaccgtgacgcgcccggtccgcgtgccttcggcgtatgtacgcgtcaccgtcgcattcgccggggcgttggatcccgcctcctcccacatctgctctaccttgcgccgcagcgtcggattgtcgcgcatgacggacacgcgccgggatttccacgtgtccggcttcaggtccagcagatcatgggccagcaccgcgattgccgcatgctccgcggccgtcccgtcgcgataatggtccatcagccagccgagccggcgcgcggtgtcgtcgtcgcgcagcttgacgctctcccccagctggtattcgacgcgttcgtcagcctcgatgcagtaatagttgttcgtcgaatccttcgccatgacgccgatgacctgctcgccgccatgctcatagcgcagaaacgtgccggcatccgccctgctcaacgtcaccgccgcggccggcatggcggcaaacaccagcgaggccaccaatgcgagagccatgacggccgcgacccccagcgcggactgacatcgcctgaatacaaccatgttcatgatattcccttcctgaaatcccgccgcgtccacgatgggcggttgatgacaccatgccatgccggacgccgtcggccaccggatttcaggcaatgtggtcgaaggctatcccccttcggcgtgttgtggataactccccacggcagttatccacatttggcggttctcggcatataagacagagggttatccacaatcgcccattggccatcagccgtatacaatgggcggtatggcagaagaaaagaaaggcgcgtcagcgcttagcagtagttcatctcgatcagccacatcgcattcggacgacaagaccgaagcgaaatccgcaacccgtcgcacttcgtcgggcaagcagtccacatcacgtaccacctcgccgcgcaagcgcacgacggccaagacgcctcgcgcctccagaacgacgaaagccgccactgcggccgccgtcgccaacggtgaggtccccgcgcagtccattcccgtcgcagacccgtcgcagttcggacgcatcgccgtcatggacgtgacgccgaacgaggaatccggccgtttccccgcccgtgtcgagctgggcgaaccgttcaaggtcaccgcgcaggtcttcatcgaaggccgcaccaaagtcggtgccaccgccatcgtgcgcaaccaccgcggcaaggagatgcagcgtctgccgatgacctgcaccaaccccggcctcgaccgctgggaggtcatgctcacctgcggcgagcacagcgacgtcaagccgtggcagcccgaattcgccgccatcaagcgccagctgggcgaatggagcgtcaccatcgaaggatgggaggacacctacaagtcctggctgcatgacgcggccatcaaagtcaaggtcaacgacgacgtcgagaacgcccttgaatccggcgcgcaattgctggaacgctgggcgaagaccgccgacgccaagctgagcgccgcgcagcgaaagatgctcgtcgccgctgccgccaccatgaaggacacatcgcttacgcccgaggaccgtctcgccgcggcgaccagcgaaccggtcgcccagctgcatctgaccaacccgctgcgcgacggcgtctcgcccagccagccccagcgtttcctcgtgcagcgtccggaatccagcttcgccgcatggtaccagttcttcccgcgttccgagggcgcctacgtcgacccggagaccggcaagatcgtccagggcacgctcaagacgtcggtgtccggcctggaacgcgccaaggccgaaggcttcgacatcgtgtacttgccgccgatcttcccgatcggcaagacgaaccgcaagggacgcaacaacgcgctggaggccggtcccgacgatccgggctcgccgttcggcatcggttccgagctgggtgggcatgacaccgtcgacccgctgctcggcaacatggacgatttcaaggcgctcgtcgccaaggcccacgagctgggtctggaaatcgcgctcgacttcgcgctgcagtgctcgcccgaccacccgtgggtcaagcagcacccggattggttccgccacaagccggacggctccatcgccttcgcggagaacccgccgaagaagtatcaggacatctatccgatcgacttcaacgccgacatgcccggcatcgagaaggaagtcgagcgtgttctcgaactgtggatcaacgccggcgtgacgatcttccgcatcgacaacccccacaccaagccggtgcgcttctggcaggacgtcatcgcggcggtcaccaagaagcacccggagatcctgttcctggccgaggcgttcacccgcccgggcatgatgcgcgcgctgagctacgttggattcacgcagtcgcactgctacttcccgtggcgcaacaccaaggaggagctgggcaagtacctggagaccacgaacggcgacgacggctactaccagcacaacacgttctggcccaccacgccggacatcctcaccgcctacgtgcgcgacaacggcatcgccggccacgctgtgcgcgcggtgctcgccgcgatgggcagcccgagctggggcatctacaacggcttcgagctgatcgagaacaagcagcgccccggtttcgaggagcagatcgacaacgagaagtacgaggtcaaggtgcgcgactggtccgccgccgacaagtacggcatcgccgagctgctgaccaacctgaaccgcgtccgccgcgagcatccgaaggtgttcagctaccacaacctgacggtgctggaatcctccgacccgaacatcctcgcattcgcccgccacacaccggccgaactgaccggcaccgacaagccggagacgctgatcgtggtggtgaacctggacggtcacgaggcgcatcaggccatggtgcatctggagctgcccgactatggcatcgatccgaagtggggtgcgcacatacacgacgagctgaccggccgcgacttcgcgtggagctgggacaacttcgtctcgttggcaccgtgggccgatgtggcgcacatcttcaccgtggtgcatgaggactgagaacgcatgagggacgcgcggccggcaggctgaccgtttcggtgatggggcccgtcgtttcggcgacgggccccatctgcgtttttgggcgaaatcgtggcgcttccggcgtacgacggggtattgtggagtgtgattatgtcaatcgactctaaggagcaatatcatggcagaaacgttcaacgttctcgttgaaatcccgcgtggttccaagaacaagtacgaagtcgaccaggagaccggccgcatcaccctggaccgtgagctgttcaccgccatgggctacccggacgactacggctacatcgaaggcacgctcggcgaggacggcgatccgctggacgcgctggtgatggtcaagaactccgtgttcccgggctgcgtcatcgagtgccgcgccgtcggcctgtaccacatggaagacgaagagggcggcgacgacaaggtgctgtgcgtgcccgccgacgtgcgctacgacgacatcaaggacgtcaacgacgtcaacgagtaccacctcaaggagatcaagcacttcttcgagcagtacaaggccctggaacccaacaaggaagtcctccccggcgactactggaccggtgcggacgttgccgagaaggaaatcaaggaggcgcgcgagcgtctcgcgaacgcgtcgaagtgatttgcttcaggacagcccggtaagctgtccggcggcaacgtgcgaggacgcgacagcgaccgagccaaccatgagccggccgaaggccgtcctcaattgcaggaccgttgccgagaaggaaatcaaggaggcgcgcgagcgtctcgcgaacgcgtcgaagtgatttgcttcgcttccgcctccgctggcgggggctgtcagccatcggctgactgggggcttaagtgccacgaccacccccagtcgctccgtgacagcccccgccagcgggggcattatattatcttatcgaccacagctttctggctcgcctacaaacagattccgctgtttgcttcacggctcgtcccgccagcggggcgatgttgtgttacagtagtgccttgtagttttcacgacttgcgaacagcattcgcttggattcaaagccggcttgctggcccggcagttctcaaagtccgtgccccctaggcgtaggcggtttatccgtcgaggcccatcccccggggaagccggcgggatgaacctttatgttccagctatgattgagatactgcttatttccgtatccgtcgccatggacgctttcgccgtctcgatcggaaaggggttgaccgtcacgcgcgtgcggccggtcgacgtcatcaagaccgcattgtggttcggcggcttccaggcattgttcccgcttctgggctttttcgcggccaacacgttcagcaaatacgtcaccgcggttgatcattggatcattttcgcgctgctcgcgttcatcggcggcaacatgatccgcgaggcgttcggcgaggaagaggagaacagccgggagacggcccagttcgactggcgccatatgctgccgctcgcggtggcgtgtagcatcgatgcgttcgccgtcggcgtgagcttcgcattcatgcaggtcaacatctggttttcggtgatcgtcatcggcgtggtgaccggcgcgttctccgctgccggcctgtatatcggccgcgtgtttggcgcacgctggcagaagccggcgcagatcgccggcggtgccgtgctcgtgctcatcggtcttaaggtgctgcttgagcaccttggcttcatagcatggtaacgcaacgagactgaaaatatgcggctgtcagcgtccgtgttcgggactttccgtgtttggatattgccgggacgatgaggccatcgtcttgccggtgcggatttcgtcgtagcgcccaaggggacatgtcttccccgcgtgtgcgtcattgcgcgcagccgaggtcctcgacccaggctcctccatgcgagccggtcgccggagggcggtccgtggcgaccgtctcgatcaggccgctcatgatggcgacctttcgccgacgaactccaccgaccgaaagaaagaagcgcgttggctgaatgacgggtacggactccctattgccctgcttggttcttgacgaaaacaaagcccaacaggcgcacaccctcttcatacccacatgcgggaaagccccggcaacgatgccgaatcccgactccccgcatcgcatactggcgaagaccaatattccccgccgaagaaaaccgtcaaatatcagaagatcagctgcatgacgaatgacgcggcgaacacgagcagaccgctgagcatcaccggcagcagcccgatacccagccacggcgccggagcggccggatccggatccgcctcgcggctccacgacaccgagcatacggcgaacagcaccgccactaccacgaacgccgcggccacgatgatgaatctcgtcagcagcccgttatccggcgacgcggagcccatgtcgatgagatcgggcacaaaacaccatcccgcggcgctgacggagaccacggcccccgtcatgcagtgcgacagcgcgcgaatcaggtggctgcgctccgcgcgcaccatctgccggccgaacgcgatgatcgtcgccgcgatcagcagtatcgcgaagcacgccgcccaacgcaccagctgatacatcaccagacgtccatcatccgcaagacgcccgccctcgtacgcggggtaaaacagctggctggccaacgacgtccgcgcgcacagaatcgacagcacgcccgcaaccgcgccgatcaggcggtcggcaatgccggcacggaacggccacccaacctggaatagcacgagcagcaccacggcgagcgcgatcgcaaccccttgcgccacaccgccctggttcccgaacgtgaactccagcacgcccgtcacgccgaatagcaccacgtatgccaccgcctgaaccgcaagtacgcggccaatcgagcttccggtacgctgttcgccgtcgcccatcgtcatcacactccacaaatcgcaatccgcggcagcctcgcgaccgccattccactaactctagcctagcgtcggctgtccacattatgcgcctacaatatgaccactaaccatatgggtactacggttatccatattcaggaaaggggaagcggttgactgatttgacgctgatgacattcgcggacgaccctgccaccgtgcttccctcacttgcactgctgtcccaccgcgtgcgcgtgctgccgatggacgccgcaagcctggtgaagatgccggagaacaccgtgctcttcctcgacgcccgggatgacctcgccacggcgaagacgctgtgccggctgattcacgcttccggcctggccacgccgatcgtgctgatcctcaccgagggcgggttcaccgtcgtcaactcgcagtggggcatcgccgatgtggtggtggcctccgcttcacccgccgaggtggaggggcgcctgcgactggtgtcggaacgcggcaatgcgccgatcacaggcgccagcaccacggacgattcggagcgcaccgaggatggccagatccgttccggcgatctcgtggtggataccaacggctacacggcatcgctgcacggcaggcccatcgatctggcgtacaaggaattcgaactgctgaagtatctggtgcagcatcccggccgtgtgttcacgcgcgcgcagctcctgcaggaggtgtggggatacgactattacggcggcacccgtaccgtcgacgtgcacatccgtcgcctgcgcgccaagctgggcggcgaatacgaacatctgatcggtaccgtgcgcaacgtcggctaccgtttcgacccgcccgagggcgagggagacaagtcactcgcggctccgacggcttccgacgacactgacgccaacgcccagtaagaccggcgcatcatgccacgcgaatccaaacgggcacgcatccagcggatgcacgaggagtacgcattgctcgtcgaggcgttcccgcacccgaaatgcgccttggatttcacttctcccctgcaattgctgatagccaccgtgctcagcgcccagacgaccgacaagcgggtgaacaccgtcacgcccgagctgttctcgcgtttccccgatgccgcatccctggccgcagcgaatccgcaggacgtcgaagacatcatccacccgctcggcttctaccgttccaagaccaagcatctgctgggattggccgcagtgctgcgtgaccgtttcggtggcgaggtccccgatacgatggactcgctggtgacgttgcctggcgtcggccgcaagacggccaacgtggtgctgggcaacgcgttcggcgtgcccggattccccgtcgatacgcatgtgatccgcgtgacgggacggctgcgctggcgcggcgactggaactcgtccagtcccgatccggtgcatatcgagcgggagatctgctcgtatttcgagccgtcgcagtggaccgacctgtcgcaccggctgattctgcatggacgcgccacctgtcacgcgcgcaaacccgattgcgaggtgtgcccacttcatgacacctgcccgagctcactgatatagaccaagcggacggacccggccggtatcccacgcatcagggatcccccgtcgacccgtttaccccgggcattacactcggagccatgcagcacagcgcacggcatacctccatcagcagttcggcgaagtccgccatcatctttgtcatcgtcgcgggggtgctcggctgcgccgtctggctgggctggtccctgctgcaccgcaaatacacgctgcccaccttcagcggcctgcaatcaagcgtcaaagtgagcgtcggcatcaccggcgccccggaatcattggatatccggacaaccgacgacgattcgctcgaccgcgtccttctcggcaacgtctatgagacgctgctgaagcgcgatgacaacaacaagatccagccgtcgctcgcctcctcgtggaaggtgtccgaagacggcaccacctaccgcttcaacctgcgcagcggcgcgacgttcgccgacggcaccacgatcacctcgtccgacgccgtatggtccctgcagcagatcatcaccaagaagtatgtcggcagcgacgaactgtccgcgctgtccaacgtggagtcggacggcaacagcacgctggtgctgcggcttcgcgaacccgacccgcggctgctcgccaagctcaccacgcgcatcggcatcgtctacaaccagcgtgagaacatcgactacgcaaagcaggccagcgggtccggaccgttcaccgtctcccaatggcaatccggcaagcagctgacgctgagccgcaacgaccactattggggtagcaagtccaaggccaagaccgtcaccgtcaacttcgcggccgacaccacggagctggccaaggctctgaacaacggccagatcgacgcggccgtcgcgctggatcagtccgccgccgacgcggtgaaagatgacggcatcgtcaagaagcagggcgtcagcaaccgcaaggtcgtgctcgccttcagcaacaacacgcagtccatcctttccgacaagcggttccggcaggcagtgcgctacctcatcgacaagaacgcgatgaccgaggcgctgggcggcggcacggtcatgaccgggccgctgtcaccgctcgacgacggatatcagaagacggatgagacgttcggccacgacatcggcaagggcaacgacctgatcaaatacttccgtttccgcgtctccagacgaccgctgaccttcgtctatccgaaggaatacggctcccagatcggcgaacaggtcaagcagacgatgtacgccgaacccgcgtattcggacgtgtccgtgtcgatggtcgacgatgccacatggagcaagaccgtgacgcaggaccgccaatacgacttcacgatctacgagaccgacggcgaggacgatctggacctcctgatggacagcaactcgtacatcggcttcgtcagcaccgactcgcagaacgcgtggagcaaggcgctgaaatccttcagcagcgacgactacgcgaagaacttccagtcgttcatcggcacgctcgacgacgattcgccggtggactggatctgcacgcgcaagccaatcagcgcgtaccgcagcaacatcaccggagtgcccgtcaacatgacctacacgcagctgccgctcgccgatatgaccaccacggactgattcgggggtccatgcgcccggacccgcccgccggcggacgcagccgcgcggctgttgtcacgattgctttctagactgtcgcttatgaccgaagagcaggataacagcatcatcaaggcacacctcaccccgttgcccgacaaggtcggcgtcgacgggctcgaagacaagtggcgcggtgaatgggacgaggacggagtctacaagttccagggaacccgcgaccgcaaggccgtctattccatcgacaccccgccgcccaccgtatccggccatctgcatgtcggccacgtgttcagctacacgcacaccgacgtgatcgcgcgattcaagcgcatgcaaggctatgacgtgttctacccgatgggctgggacgacaacggcctgcccaccgagcgccgcgtgcagaactactacggcgtgcgcgtggacacgtcgctcaagtacgatcctgatttcaagccgccgttcgagggcaccgacggcaagaagatcgacgccaaggatcaggtgccggtctcgcgcaagaacttcatcgagctgtgcgagaagctcaccgcccaggacgagaagcagttcgaggcgctatggcgttccctcggcctgtcgatcgactggtcgcagacctaccacaccatcggcgagcacccgcagcgcgtggcgcagaaggcgttcctgcgcaacctcgcgcgcggtgaggcgtatcagcaggacgcgcccggcctgtgggacgtgacgttccagaccgccgtggcccaggccgagctggaaagccgcgaataccccggcttctaccacaaggtcgccttccgtttcgaggacggcacgccgatctacatcgagaccacccgtcccgagctgctcgcggcctgcacctcgctgatcgcgaacccgaacgacgagcgttacaagcagtatttcggccagtccgtgtactccccgctgttcaaggtcaaggtgccgattctcgcgcacccggccgccgagatggacaagggcgccggcatcgcgatgtgctgcaccttcggtgacgtgaccgatgtcgagtggtggcgcgacctgaagctgccgacccgcccgatcatccaacgcaacggccgcatcgtcatggacaccccggattggatcaccgacccggccggccgtgagatgttcgccgcgaccgccggcaagaccacgttctccgcccgcaagatcatcgtcgacgcgctgcgcgaggccggcgacctggacggcgagccgaccccgaccaagcgtatgacgaacttctacgagaagggcgacaagccgctggagatcgtcacctcccgtcagtggtacctgaagaacggcggcaccgacgccaaactgaacgccgagctgatcgagcgcggcaaggagctcaacttccaccccgatttcatgcgcgtgcgctacgagaactgggtgcatggcctcaacggcgactggctgatctcccgccagcgcttctttggcgtgccgttcccgctgtggtacccggtcaaggcttccggtgagccggattacgatcatccgatcactccgagcgaggaccgtttgccgatcgacccgaccaatgacgtgccggaaggctacgacgagtcccagcgcgatgtgcccggcggcttcaccgccgagccggacatcatggacacgtgggcgacgtcctcgctcaccccgcagatcgtgacccgctgggaggagccggacgaggcttccaaggcgctgttcaaggccacgttcccgatggatctgcgtccgcagggtcaggacatcatccgcacctggctgttctcgaccgtggatcgcgcccatctggagaacaagtgcctgccgtgggcgcacgccacgctgtcgggctggatcctggaccccgaccacaagaagatgtcgaagtccaagggcaacgtcgtcgtgccgaacaagccgatcgagcagttcggcgccgacgcggtgcgctactgggccgccgcggcccgtctcggcctcgacgccacgtatgacgaaggccagatgaagatcggccgccgtcttgcgatcaagctgctcaacgcctcgaagttcgcgctggccatcggtcgcgaggacgagaaccatcatgtgggcgagacggccgacgccgtctggaacccggtcgatgtgaccgagccgctcgaccgcgccgtgatggcgaagctggcgctggtgatccgccaggccaccgacgcgctgaacgcctacgagcattccaaggcgctggaagtcatcgagagcttcttctggcagttctgcgacgactacatcgaactggtcaagaaccgcgcgtacggcactgccgacgcgcacggcaaggtgccgagcgacgcggccgtgaagtccgcgcgcacgacgctgggcctaggcctggacgccttcgcgcgcctgctggccccgtacctgccgttcgccaccgaagaggtgtggagctggatgcacaccggcgaggggtccgtgcaccgcgccgcttggccgaaggccgacatctatgccgcagcagccaccggtgcctccccggagacgctggcttgggccggcaaggccgtcgagcagctgcgcaagatcaagtccgaggccaaggtctcgatgaagaccccgatcctgtcggtgacgctggccgccgtcaaggacggcatcgacgccatcaagtccgctctggacgacgtggcgcaggccggccgcgtgatcggcaagttcgatctcgccgaaaagcacgccgaggaggccacggccgaaggcgagggcgacgataccgtcgtcatcgatgccagcgagctcggtgagccgccggcgaagaaggccaagaagtaacctgcttctcactaacggaaacggccccctcggatccacgagggggccgttttgcacccacggcatcgtgacggcggcatgccggccgcgcgccgtgcgccgtatgccacgcacccgtcacacggctggcatgatgatcagcagacgcagatcctcggtatgccggttccagtcggatagcacgtcgtaactgtgccgcccgtcggcgatgcagtggtcggagtatgcgttggcaccgtcgcacgacaaccgtctcaacgcggcagcgagacgcgcgaccggtttgccgtcgacggccgcgctgccgctgccgctgccggccaacgattgcgcggcctgaaccagcatgtcggagacgtcaccaatcgccactgtctcgtcgatgagctcagacgacgtgctctgcaacggcgatctggggttcatgccggcgatgccgtataccggcgagaacttcggaaccgacgccgacttcgaaccggatgccgtgcccgccgccgaagatgagccactgccgctggcgttgccatccttgccgtcgccgctatccttgttgccgcccttgccgtcgctcttgacggcgtcgccgagcatgcccaggccgctggcgttgcccatcacatcgccgatactcatgcctgactgcgagtcgtcatcggtcttgccactggccaacgcctgcgccttgcgctcggcctcctcacgctcctgcttgctgacggcggccagccgcttgcgctcggccttcgccgccatcgacgtcgtgtcggaaccggcccagccgtaacgcacccggtccgcagccgcatcgccaccttgcgcatcgccggtggaggcggtgctggtcagtgcgccggcgaactgtatgctgatctgctgcaatgcgttcgccgcgcccgtatgttcggatgccgccgccaaggcgtccatcgccgactgcactttctgattgtcgtcctgaaggtcggcgctggtggagaactcctcgttggcggcgtcaatcgcctgttgctgataccgcgcggctcccgccgacgtgcctccggtcagctcgctcagatgcttggtgtacacgtcggtgtaggccatcgaataggggatcatcgcgttggacagctggctctgcccggccttgtacgccgtcgcgccctcggtggactcctgggccatggtctggctgatctcatcggcgagtcccgacgtgccgcgctgacggatgcgctgaatcaggtcgtctatggcatgtactgcgccgtcgtgctcatgcgcggcactgaccgcgttgaccgcgttggcgaggtcggtgaccgcctgcgccatcggggtgtcgccggtcagttcgccggctgtgccgatcagcgcctgcatctgcgtggatgagccgatgctgccggacagatgggtcgtgtacgaccccacgtaatgcgccatatacgacgagaacgcagccttgtgcgctgcggttttctccttgatcgccttctcgccgagcttctgctcgcgatcgcgcatggtggtcagctgttcgattagtttgtggtccgacgcggaaccggtgacgaccagcgtgttgaccagtgcgtcagcacggtcggagacagccgtgacctcgtcgacgaacgacgccgtgtcatcggcctgcacggtcacgaacgccagttggctcatcgagaagttcttcgcgttcatatagcagtcgaacaccgtgcgtttgccgggctccccgacgccgctgacaagcatgtcggatccttgcgtcgtcagcgtcatgccgtctccgacggtgatatcgtcggagacggcagacggtacggtgaacgccaccacgggaatgctgttctccgcgtagccgttggacacggccgcattgggctccacggtgatacggatatcgaccagtccgctggcaccggcgatctgggacggcttcgcctgcgggccgttcaggccgtaggcgatgctgaccgaccacggcaacacgcgttgcccggccttcacccgctcctgtgtggtcttgccggtttccacagccttgtattccgccgcgagcatggaaccgtcaccgctgttgccggccacgtagtcgacgatgtcgccgccacgggagaccgtgaactggttggtgacgtacaggcgtcccggaaccccgtccgagttggcgagagacatgacattctgcgtcttggaatacccggcatctccttcggccggattggcaccggccgtgaccggcccgcccgccgaaggggccagagtcagggccagcgtggcgacagccgccaggcttcgcgtcatcaccccggtcatatgcgccatcgtcgctccccctttcattcatcatcacgcggcccgcatgccgaatacaggcatgcatatgcacgccaccgacgatgcgggcagagcggcaaatctccgccgatcaggcgaacacgtcgagcacgccgggatcccctcccgcgtcggcgatgcgctgatgccgcttcttggcctcggccaccacgaattcccggtacatttccgcgatgtcgggatcgagtccggcgtcgatggcgatgcggtgcagccgttcgatctggtagtcctcgcgcttgtaatccgccggcgcgaagccggcccgcgccttgagtacgcccacctgggacgtgtacttgaaccgctccgcgagcaaggagacgatggccgtgtccacattgtcgatggactgcctgagcgccttgatcttggccacggtgaccgcggtctgcgggtcatgccgtgcggtgtcggcgtcgatgacggtttcggatccgccgcctcccacctcgcgggatgacggcttcgcccaatcgctgttctcgggttcactcatactgcctaccatagcgcgtgggccgaacccgggccgtcggctattcctcaacgatggaacgatatggtcaatgccggccgggatgtctaacgcctacggcgaatggcatccgtcagaaatacgtctgcaggatcaccgtgctttcggtgctgaccggcaccgtccgatggatgcggttcagcagctcctccagtttgctgggtgacgacacgcgaaccaccagcatgaagctgggcgcgccggctatggagtagcaggacaccacgccttccagctcatgcagcttgccggggatatcggcctcctgcgagtagtccagcggcgtgacggacacgaacgcgctgatcggcagaccgcacagctcatagtcgagcaccgcgcgataccccttgatgactcctcgcttctccagcttctgcacgcgggactgcaccgcggacaccgacaggccggacagccgggacagctgagccagcgtggcccgcccgtcctcctccaacgcatcgaggatggactcgtccgtggcgtcgagcatggcggagccctccggcctgatctccaccttgcgcgatgccgcgtccggttcctcgtcattgcgcgtattcgcctgtgccatcacgtcctcccgggtcatacggttcgccgcaacctgcatgtggagcggttccggcgcgaacttgtctgatgacagcttatcgcgatgtcaatccagtattattccattgatttcttactgttatttacgaaatatatagtaataattactgtttttcaatgtactactgtatattttatattcttgttcatgattgaaaggtgacaccatgtccatgcccgcactttcgcagcactcgctcagcgtcccccgttccggcatccgggacgtattcgaccgggtcgagcacgtgcctgacgcaatctcgctgtgcgtgggcgaacccagcgccaccgcggcgccgcatatcgtggaagccgcatgccgatcgatccgcgaaggacacaccacatacacgaacgtgctcggcatcgagccgttccgcgaggccgtggcggcatactccgaaaaggtgaaggggctgcgctacgacgtcgacaccgagatacaggcggtcgacggcgcgaccatcggtctgttcctggcgatgaaggcgctgcttgacgccggcgacgaagtgatccttccgtcgccgtacttcacctcgtacgatgcggaggccctgatgtgcggcggagtgccggtgcccgtcgcgctcaaaccggaacaccagatgcggctgaacgccgacgatatcgaagcagcaatcacgccgcgcacgaaggctgttcttctcaactcccccggcaacccgtccggagccgtcacgccgctatccgagctggagcgcatcgccgacgtctgcatccggcatgacatctgggcgatctccgacgaggtgtatcacccgttcgtcttcgacggctccgcgtcaatcgcgccctccatcgccgccgtcgacggcatgcacgagcgcacggtcgtcgtcgaaagcctgtccaagaccttcgccatgaccggctggcgcatcggctacctgctcggccccgagccgctgattgaacagaccagcaagctcgccgagctgatgcactcatcggtcaactcgacggcgcaatatgccgccgtggccgcgttgaccggcccgcaggagcatgtcacggccatgcgcgaggaataccgcaccaagcggcagatcgtgctggacgagctcgacggctgcaccgcgctgcgcctgatcgagccgcagggcgcgttctacgcgttcgtggacgtgcgagcctgcggcatggattgcgacaggttcagccgtatgctgctggacgaggagcgcgtcgccgtggtgccgggaacggccttcggcagtgagggggccggattcgtgaggctttcctacgccggggacgggcgtgagctgcgcgagggcgtgcgacggatgcgcgtgttcgccgaacgtcacgtcgaccccgcgctgggccgccatacgcccggataccatcatctgcagatcatggcctgaaagcaggccggatatagacgggagccccgcttcaatgccgaagcggggctcctctcgttcaggccgtcgtgccggagcccggcagacggcagccggatcagttgccgttgaccgggttgctgttgctctgctggataatggcggcgaggaagtcgcggttcgtcgcggtcttcttcaggcgcggcaccagcgtctggtatgcctgctcgggctccatgccgccgagcagacggcgcagacgatagataatcggcagttcctgcggcgaggtgatgagctcttcgcggcgggtgccggaggcgttcacgtcgatggccgggaacaggcgcttgtcggccagctcgcggctcagacgcagttccatgttgccggtgcccttgaactcctcgaagatcacctcgtccatcttggagccggtctccaccagcgcggaggagatgatggtcagcgagccgccgttttcgatgttgcgggcggcaccgaagaacttcttcggcgggtagagcgcctgggcgtccacgccaccggacaggatgcggccggaggccggcgcggcgatgttgtaggcgcgggcgagacgggtcatcgagtcaagcaacaccaccacgtcctgaccgagctccacgagtcgcttggcgcgctcgatggcgagctcggcgacggtggtgtggtcggaggccgggcggtcgaaggtcgaggagatgacctcgccggccacggtgcgctccatgtcggtgacctcttcggggcgttcgtccaccagcacgaccatcaggtgcacttcggggttgttcgtggtgatcgcgttggcgatgttctgcagcgtgatcgtcttgccggccttcggcggggagacgatcaggccgcgctggcccttgccgatcggggaaacgatgtccatgatgcggccggtgagcttgttcggcgtggtctcctgcttgaggcgctcctgcgggtacagcggggtgagcttggcgaactgcgggcggttggccgcctcttcgacgctcatgccgttgatggtatcgacggactgcagcggcacgaacttctggcgctggttgcggcggtcgccctcgcgcggagcgcggatggatccggtcacggcgtcgcccttgcgcaggccgtacttcttgacctgacccatcgagatgtacacgtcgttcgggccgggcaggtagccggaagtgcgcacgaaggcgtaggagtcgagcacgtcgacgatgccggcgaccggcacgagatcgtcgccgccgttgtcctgatggtcggagatgcgcacttcgcgggtgtcgcgatcatcgtagtcgcggccgccacggtcgcgtccgcgcatgcggcgctggcgacggtcgttaccgcggtcgccacggtcattgcgatcgccgccgcgatcgccgcgatcggtgcggtcattgcggtcggaacggtcagcgcggtcgctacggttgcggcgggtgaattcgcgctcgtcgtcatcgcgattatcacggtcatcacgggtgccgcgggcggcgtccgcattggcgttctgcaccggaagcgtggcgagaatatcgtcgaggtcgcggacggtgtcgttctgctggtcgcgctcgcgtggttcgatggcacggcgacgacgacgcatcatgccggaatcagccgcatcatcgcgatgacgcggctgatcgtccgccggcgcgatgtcaagttcatcaaacagatcggcagccacctggcccgcctttgcatcgtcgcgggtgcgacggcgaggagccgcggcgcggtcgtccttgctgtcggattcggcggccttctggcgggagatacgcggcgtgcgggtcgaggctgcatcgggctcgggcagagacgcgaccagtccggccaccgcgtcatccgccgccgacaccggtgcactgcccttgggttccgccttgggagcctgttccggagtctgcgcggcctgtgcagcgggctgcgtctgctgggtcggcttgcttgcggcgcccttcaccggtcgcacggtaacgcccgccggcgcctcgccgcctgatcgtgcagcctgcagggtggcgaccaattccggcttgcgcatcgtcgacgtaccgcgcagacccatttgcttggcgagctccttgagctcgatcagcttcataccttcaagattctggctagttgccactcgtttgcctttccttagcagaccgtattgcaccggtccctgcactaagaatgattgcggtcttgccgctttgaacgtccgacgcactccatgcgtttcggactttccatactgtataacgggctggagaccaatgcaaaaacggacgccgagtcgcagacataaacaaatgcccccgctggcgggggcgatatctggtgtgggttacttttgttcgtggtaggacttatccgtgttcacggaccacacgttctgcttcgaggtcttaccggacttgatgttggcgacggcctcgatggcggtggccatggagtggtccatgttgttgtagcggtgctggccgttgcggccgacgcagtaaaggttgccgaaggagtcgaggtattcgatgagttcggacatctgggcataggtgtcgaagtaggcgggatacgcctttttgacacgttcgcgatgggagtcgaggacatcctgcgggccgttgatgacacgcatgcgggtcagttcggaaatggcgaacttggtggcctcggcgtcggtcatgttccagaaatcgtcaccctcgttgcagaagtattcgaggccgatccagacggtatcgtcgacatccttgacaaggtaggggctccagttgttgaagatctggagacgaccgaccttgtaaccgggatcctgcacgtagatccagcaatcgggcacgatgggcgggttgccgagcgtggggatgtcggtggtgttcttgaggcgcatgtgctttacgagcagtccgacggtgacgaaatcacggtagggcaggccgttggcgatgtgggtcatgtcctgcgggacaggcgccgaagacgattcggcgtcatcgtcatgagacgccgcatcgatggcgttgacgaggtccttgacgggcatggacgagatgaactggtcggcgtgcagttcggtgcgcttgccgtccgaggactcgtagaccacggattcgatacggccctgtgcctgacgaatctcgacgaccttggcatcggtgatgacggtggcaccggcgtcgacgcaccggcgttccacggtctcccagagctggccggggccgagcttggggtaccagaactcctcgatgagcgacgtttcgacctcacccttgcgcttcttggggctgagcttgcggaaggcgttcttgagaacgccgaggatgctgaggcccttgacgcgctgggcaccccaatcggcggagatctgcgagggatgacgcccccacagcttctcggtgtagccctcgaagaacatggagtagagcttgcggccgaaccggttgatgtagaagttctccagactggtctccggcagcttatggaacatggacttgaggtagctgaaacccgcgaccatggtgagcttgaagcccatcgccttgaaggtgttggcggacagggagatcgggtagtcgaagaaccggcggttccagtagatgcgggagacgcggtggcgcttgagcatcacctggtcggtggtttcggggtcgggaccgcccggctccatgtcgtgctcacgaccgagtttcttgtcgtcatagctgggggcgccctgcagcggcagcacgtccttccaccagtccatgatccggtcgtccttggagaagaagcggtgaccgccgatatccatgcggttgccgttgtgcttgacggtacgcgaaatgccgccgaactcctgcgtttcttcgagtacggtcacatcgtatgtgtcggagccgccgttgttgacgaactcccatgctgcggtcaggccagccgggccgccgccgatgatcaccacagattgcttctgcgtcacgtgaggtctccttatcgctgaatcagagacagtatatatgaaccgctggaaacgcacgccgattttgttgttttgcttacaaaaaccttccgtcgccatacacgagaagccgcgtatcgcaacgaaaacgagagcgggaaacggcgacgtgccggtttggggcgcacacggcaccggcaaatgacggcggacggccgaccgcagtcggcctgcaatcagccggtccgaccgtcagcgcctcaattcatatcgtcggggatgtcgatatcggatttctgcacttcctcgacattcacgtccttgaacgtgacgatgcgcacgttcttgacgaaacgcgacgaccggtacacatcccacacccatgcgtcggtgagctgcacgtcgaaatacacgtcctgaccggcggaacgcacgttgaaatcgaccttgttcgccagataaaaacgccgttcggtctccaccacgtaggtgaacagcttgatgacgtcgcgatactccttgtacagggtgagttccgcgtcggtttcgtaattgtcaagatcctcggcactcattcgtcatcctccatatcacgtttacggccacgtccgaggatacgccaccaagcttccttcgaaggtttgcgttcgctctgcccatacggccaggtgcttccctcacccggcgcggccaattcatcgtcattgtgcgcttccggcactcgggctgcggcgactttctcgattcggggcgcctgttcggcatccgcactctcctcgaccgcggcgggctccggcgcgggctcggcctgcgcggcgatgttcttcctgatggcgatcgagtgctcacgggcgctcatcgcctcctgcacaccgggattgtcctcaatcacgtgcatgccgaacgcgtcgagagagcggatgggatcatactcgtccaccagcgtgtccatgacaatcagatcctggtatttgttgttctccgcatcccacagagcgtcacgcgaggcgccggacggctcgaagccgagcgactggtagacggagcacgaacgcgagttctgctcgggcaccgccacccagatgcggtgcatgcccaggccggccggttcgggcgcgaaaccgtacgtcatgactcgcggcatcaggtcgcgcgagtagccgcgcccgcggtagtcacggcccagcaccacctggatgcgggcggagcgcgaccagccatcgatgtcgatcaggaaaatcatgccgatgacgttgtctgtcgactgcgcgtcgatttcgccgtcctcgtcatggtcggcgtcggtcagtaccgcccatgcgatggtgcggcgggactccggatcgcctacgcccgactcgtcgggcttctgcccgttcgcccacgccaccgagcgtctcacccacgtgtgtacgacggcgcgttccgcctgagcgtccttgccggtgatcttggaggcgccatagtaggcgtccagctcatccatgcgcggcaggtcgtcgacgctggccgggcgcaggtgcaccatctcccccttgatcggcggtatggtgatctgcgagggcagctcacgggatacgtcctgatcgagcggtaatgcggcattttcagacattcgttattcctcaactgacgctggtagaagtcggtacagaagatatcctacccgactgaccgtttgctgtgaaggagttgcccacgtgtctgccggccgtgggagcgcctgcggcatgacgaacggccctcgacacgcggttcagcaccgcggccaagggccgttcttcaaaccggaatttcagggtctcgggattccggcgaacccgcggggcgtcagcccttgatcttgcccatcacgaccttggtgacagccttcgcgtcggcctggccgcgcgtggccttcatcacggctccgatgatgacacccatcggcttcatattgccgctcttgagcttctcgacgacatccgggttggcctcgaacgccgcgtcgacggccgcctcgatggcgccgttgtcctcgacgatcttgtagtcgtgcttcctgacgacctcatccggggtgccttcgcccttgagcacgccttcgacggtctgcttggcgagcttgtcgttgagcttgccgtcggcgatgagcttctcgacctcggcgatgtcggccggggtgattggcagctcttcgagcgagacgcccttggcgttggcctcgcggctcagctcgcccagccaccacttgcgggcaccggcggccttggcgccggccttgacggtctcctcgatcaggtcgagcgcgtcggcgttgaggatgtcgcgcatctgcaggtcgctcaggccccattcggccttgagacggttgcggcgctcgcgcggcatctccggcatctgggccttcatctcctcgatgtgctccttggtgatgtggagcatgaccaggtcgggatccgggaagtagcggtagtcgtcggcgtcggacttgagacggccgccggcggtggtctgcgtggcctcatcccagtggcgggtctcctgcaggatctccttgccgtcgtccagacgcgccgcctggcggcggatctcgtactggatggttttctcgatgccgcggaacgagttcacgttcttggtctccgaacgggtgccgtacggggcgtcggcggaggggcgcagcgagacgttcacgtcggcgcgcatattgccctgctccatgcgggcgtggctgatgttcagcgcacgcacgatgtcgcggatagcgcgcatgtaagcgccggcgatctccggagcgcgatcgcccgcaccctcgatcggcttggtgacgatctcgatcagcggcacgccggcacggttgtagtcgaccagcgaatggtcggcgccttcgatgcggccgtcggcaccgcccacgtgggtgttcttgccggcgtcgtcctcgatgtgggcgcgctcgatcggcacgcggaacacggtgccgtcctcaagctcgacatccaggtagccgttgccgttggtgggcttgtcgtactgcgagatctggtagtcgcgcggcatgtccgggtagaagtagttcttgcgggcgaactggctccactctgcgatctcgcagtgcagggccagacccagcttgatcgcgtagtcgaccgcggtcttgttgatgaccggcagggagccgggcagaccgagggagaccggggtcagctgcgtgttcggctcgccgccgaactcgatgtgggccgggcagaacagcttggtgttcgtggacagctccacgtgcgtttccagaccgaagaccacgtcgtatttcttggtggcatcggcatacttcatcagtttttcagccatgatgtttgttttccttccgatgcgtcacttgttcaggccgtcgaaccacggggtcttcagggactgccagatcgggccgccccagctttcctcaagtgcggcttcgagcgcggcggcgggcttgtacatgacctcgtcgcgctgctgcggagcgatgaactggaatccgacaggcaggccgtcgtcggacaggccggccggaatcgacatggccgggacaccggcgagattcgccggaatcgtggcgatgtcgttcatgtacatggccagcgggtcgttcatcttctcgccgaacttgaacgcggtggacgggctggtcggggagaccagcacgtcggccttctcgaaggcgttgtggaagtcctggatgatgagcgtgcgcaccttctgcgcggaaccgtaccaggcgtcgtagtagccggcggacagcgcgtaggtgccgaggatgatgcggcgcttgacctcgtcgccgaagccggtctcacgggtgtaggccatcatgttggcggcggtctgcggtacaccggtcggcggcatcacgcgcaggccgtagcgcatgccgtcgtagcgggccaggttggagctgacctcggacggcatgatgatgtagtacgcgcccagcgagtactcgaagtgcgggcaggagacctcgacgacctcggcgcccatctcttcgagcttcttgacggcctcgttgaagcgggcctcgacgccgggctggtagccgtcgccgccgagttccttgatcaggccgaccttgagtcccttaaggtcgcgcttgaggccctcgcgggccgcagctgccatcggacgcgggccttcgggaatcgacgtcgaatcacgcttgtcgtgaccgccgatgatctcctgcagcagcgcggagtcgagcacggtgcgggagaccgggccgatctggtcgagcgaggaggccatggcgatggcgccgaaacggctcacgccgccgtaggtgggcttgacgcccacggtaccggtcagggcgccgggctggcggatcgagccaccggtgtcggtgccgagggcgatcggggcttcgaatgccgcgaccgcggaagcggagccaccaccggagccaccgggcacgcgctcggtgtcccacgggttgtgcgtggtctggtaggcggagtgctcggtcgaggagccctgcgcgaattcgtcgaggttggtcttgccgagcagcggcatgccggcggccttgagcttctcgatgacggtggcgtcgtacggcggcacccagccttcgaggatcttcgaggcggcggtggtctcgatgcccttggtgacgatcatatccttgatggcaatcggcacaccggccagttcgggcagcgcggccttgtcgtcggcgctcttggcgtcgaaggcgtcggcctggtcgagcgcctgatcggcggagaccttcaggaacgccttgatggacggttcggcggcgtcgatgacggcgaggtgggcctcgaccagttcgcggctggagacctcaccggtcttgaccttggcggccatttcggccgcggacagcttgacgagttcagtggtgtcgctcatcgtcactcctcacttcccagaatgcgcggcgcgacgaacatgccggcttcggtcttcgggcctccggcaagcgcctcttcctgcgtcagcggcgtttcggcgacgtcggggcgcaggtacgcctccagcgggacggggttggcggtcggcggcacgtcatcgccggcgaccttctgcaccttgttgatggaatccgcgatgacgttcagctcaccctgcagacgggtgatctcctcatcggtgagcgcgatacgggcgagatcgcccaggtgctcgatttcttcacgtgtgaatgtaggcatggccttaactatatgagccgtatgtgacacgcaccattacattctcacgatgttgcgcggcgtccggcggccctgcggcagcggccatatcgcgcggctgtgcccgagcgcgcgacgatatggccgaatgggtgtcatttgatgtcggatttcttgaacaccagcaggccgatcaatggaatcctccactcgtcggcagccagtggcgtgacctcgtggccgaggaacaccagtctcgccacgccgagcgacggcacgggctgaggctgcggcgggatatgaggctgcgtcatcgcggcacctcctgcgtgttcggctgagtgtaggttgcggcaggctcgccgtattgggccggcacctgccccggtatcgcgcgggtctcgtactgcgcctgcgcgtgggtgaacgcccacgcagtcggctccaatgcggcaccttcaatgcggaacacccggccttgctgcgggtcgttggcattgcggggcacctcgcggacggtgacctgcggcgcggtttcgaacaccgcgtgcagtttgtcgggttccggcgccgcgacacggatcgaatgggcggaatgctctgcgacgaacgccgcgaccgtcgtggtctccagaatgcggccacgaccgatgatgacgagatcgtcagcggtcaatgcgacctcgctcatcaggcgcgaactcaacagcaccgcacggccctgcccggcgagaacgctcctgcattgcgcttttccacgctcgcaaggccggtgaattcgatgacctcatcgacgcgggatcgcggtatgccgttggtaagggcgaggccacgcagatgggtgtaggcggaccgacccttatgcgcggatttggcgtcgagaaccgctcctacggcggtcatcggcgatggtgtcttgacgaacggcactccgtcaaccagcgcacggcccgcattgggggtgaccaagccgagggcggcccgcatcgtcgtggacttcccggcgccgttcgacccaaggaaaccggtcaccttgtcgtcttcggcggtgaaactggcattatcaagcacggtcttacgcccgaagcgtttggtaaggcctctatcgttatcatgattcgagcatacacacccgcgtcacccgtgctgcgcaatccagctgtgcatggccactgcggctgcggcgccggcgttgatggaccgcacggaaccgaattgcgagatgtataccacgtcatcagcgagttcgagagctttgttcgacaatccggggccttccgcgccaaacagcatcagacaccgttccggaaaacggtaggtttccatcggtacggcaccgggaatgatatccaatgcgatgatgcgggacgattccagcgtcctgatgcgagcgtcggcccgcgcgaccgcatcatagcccgaatgatccgttgcggacgcgaatcggggggatccgttggattcgtcatcgtccgagagaagcgcactcgcatcggagtgagcctgatgcgcgtgcatcgccgcggcggcggcctgtgcctgggcggcggcaatttctcccgcgatgcgcagcttccagcaggtgacgagttcgtcgatgctgggatgatactcaacgtgctggtacagctcggtcatcagcgagcccttgcggttccatttgtgcgggccaacgatgtgcacgcgattcgcggtgaacgcattcgccgtgcgcaccatggaaccgatgttgaaatcgtgcgtccagttttcgatggcgacttcgaagccgtggcgaccggccgcgtccagatcgtcgcgaatggcgttcacggtccagtaccggtaacggtcgagcacgttgcgacgatcgccttcatccagcagcgtcgtatcgtagcgtcgatcgtagttcggcgatttagggtcatccgggcgtggctcaccggggtgctcctgcgtccatggtcctacgccgacttcacgaaattccggctcccccgaagcctttgccgccagagagatggggttgggcttgtgcatggctatcgcagttcggattcgtggtagatttcgacgaatggcagctcctgccgttcaccgctcacggggttgacgacctcgatgacgggttcggtcatgtcgacgccgccgatcagcgatgcgatggcaaccactttcgcgccttcatgctccaccacgccgaaatcgaggctcagctcattgccgttgcgcagcgtcaccagcgacgaggtctgcacataggatttctccgagagccatgaatccagcaataccacgcgcttgcccttgatggacgggcctttgatggacgggtatacgaagtccatgacgaatccgtcgaggtcttcaccgcgcgatgccgccgcctgaatcatcgcgccgaccagtggaacggccgcggcggtcaacgcaccgacggcgtcgaaatcatcgatggaatagccgttctcctcaagcgtgtccagaagaatgtgaccgacgatagccgccccgcgatggtcgaaggtgacgccggcgagctcgcagaacggcttgccttccatttccgcggcaatcagccgtcggagctgttcgcgcggctccagcatggagaagtcatccgtctgactcggcgatgcgtcggaaggaatgttgttcgtgcccacagcggttccggtcgtcccggtcttgcggaatccttgctcttcattcatggttctcaggatatcgttgcgtgccgtcaagtcaccgccggcaatggccatgcatatccgcgcggttgcgtatttgcctcgctggcgggggccgagtcatgctggtattcctttggatgctctagcgttggttttattcgggggtggtttccggggcggtgatttcacggacatcggatttgtccggatcgatgatgttcaccgacccgatgaccgtggcctgatcgagcttctgcagtttgcgcgcggtgaccagcacgcgggattccaacgatgatgcgaattggttgtacgccgtcacggtgcgggtgagcgcggtaccgagtttgttcgcgcgctcccccagtacggcgaaacgctcgtacagttccctcgacaggtcgaacagggtcttggcgtcatcggtgaggctctgctgctgccaagcgtatgcgacggatttcagcacggcccacagggtgaccggcgaggtcaatgcgaccttgcgggcgaaggcgtcatccatcaatgtcggatcggcctccattgcagcctgcagcaacgcctcgttgggaatgaacgcgatcacgaaatcaggggccgtgtcgcatgcactccaatacgccttatcacccaatgccctgacgtgttcacgcaaagctttcgcatgcgaccgcagcagctcgtcacgccgttccagatcctcaggccccgcggtttccggaatcatgcaggcccgctgataatcggcatacggcaccttcgcgtcgatgggaatcgtcttgcctcccggcagatggacgatcatgtcaggccggagcgtcttaccgtcgacgccagtcatcaccacctgcgtatcgaagtcgacgtgctccagcaaaccggcggactccacaatgttgcgcagttgcgcctctccccaagcgccgcggaccttgttgttgcgcaatgccgccgagagcgagctcgtctcacggtcgagcctcgcctgctgctcacccagccctttgagctgctcgcccagcacgcccatctcgtgtttgcgcccctcctcgatgttcgagaccttctgctgcagctcatcgagattcttctgcaaaggagccaacgccgacagcaccttgccctgctctgtcagcgcttttttctgctcttcccggcgccgcagcccatcggcctcggcccgctcgcgctcacgttgcacccgcacctgttccgcctgctgcgcctgagcaagctgggatttcgcgaacgacaattgctgcagaagtccctcggactgggccttggcctgagccacttgggcggcaagccgcgcattgtcgtccttcatggcctcgcaggatcccctcagcgcgtccacctcggaggccttcgccatgcgggcggaggcttggccacgcattttgcccagcgcgaatccggcggccagacccaacaacgccaccaccgcaacgatcaccacatcaagcacttcatcgaacatgtgtattattacacatcatcccgcggacgagcgagtgccgcacttatgagcgaaccagtcgggaaatcaccttctcgacctccgacagtttctcgtcggccacctcgccgccctcggccgccgcctgccgcacgcaatggttcagatggtcgtcaaccagcatcaccgacacggccttcaatgccgaagtcgcggcggagatctgggtcagcacatcgatgcaatacacatcatcctccaccatctgcgcgaccgcatggacctgcccctcgacacgccgcagccgcgcgaggatcttcgccttgtctccgtcgtaaccctgcataaccagccttccgcccagcgcgaatattcccgacaacacgcattatataccctctaggggtatagggtatagttaatatccgagattatgatagaaaggggaaaggagcggcgatggaattcgacatcttcctcggtgtggcggcactggtgatagccgccgtgctgacatggtgcatcctgcgattcttcttcgcgcccagaaggagaggcgcccgggcgacgctgcatgacggcgttcaacaggcgaccatcacggtcaggggtgggtactcccccgatatcgtcacgatgcaagccggcattccgatcacgctgaggttcgatcggaaggagaccggcgaatgcacgtcgcatgtcgtgttccccgacctcggaacggacacgatgctgccgggcaacgagaccaccgagatgtcgcttccgccgctgccggccggcgactacccctttgcatgcggcatgaacatggtgcatgggttgcttcgcgtcgagggggagacggactccgccacaaaaccggacgacggcactgcatcgaccgggaccgccataccggccggcacgcccaggatgtccgccgcggacgcgctgctggccgagcggcaggaggtggaggaacgccgtcaggagattcgccataccggcatgctggtggccatcggcaccgttctcacgctcccggtgttcgtccccatgatgctcatgctcgtcagtcactcgctcgttccttcatggctgatgaacccttggctgcaggccatactcatcaccccggtcatgttctactgcggggcgccgatccaccgcgtcggatggccggcactgtggcatcgttctccggatatgaactcgttggtggcattggggaccaccgccgcatacctgtacagcatcgccttgtgcttcgtctcggagctgatgcccgaggggtcgagagagccctacttcgagtcggtcggcgtagtgatcacgctcgttctggtcggacgcctgttggaggcgaaagcccgtgagggcaccggaaaggccgtgcaatcactgatcaagctgcgcccacgtgtcgcccacatcctcgatgtcggaacgccactggccaaggatctggccgccggcaaggcatccggcgacggatggctcgaccctgcccaatcccaagacatcgacatcgaccgcgtgaagaccggcgatctgctggtgatccgcgccggcgagcgcataccgctggacggcgtcgtgttggccggcgaggccagcgtcgacgagtccatgatcaccggcgaatccgttctggcccggcgtggcgtcggagagcccctgacgggggcgaccatcatgcagcagggcaatgtggtcatgaaggtcacacgcaccggcgaggacacggtgctctcccagatcatcgctctggtcgcacgcgcacaggcgaccaaagcgcccgtgcagcgtctggccgacaggatcgcccgcgtgttcgtccccgcggtgattatcgccgcattgtggaccggtgccatatggataacgttcgggccgcaacccaaactagcccatgcgctggtgacggcggtcagcgtattgatcatcgcgtgtccttgcgcgctcggactggccacgccgctatcggtgaccgcggcgaccggcctcggcgccacgaacggcgtgctggtcacatccgccagggccttggagcaggcccgcgacatccgaaccgtcgtgttcgacaagaccgggacgatcaccgtcggagccatcgatgacgacgccgactacgccaagccgagctatacgaaggacagcgtcaagccgggttccaaggaggcgatagcagcgcttcgagccgctggcatccgcacggtgatgctgtcgggagacaaggcggaggtcgccgaacgcgtcgccgcggaagtcggcatcgacacggtgatcgctcaggtcaggcccgacggcaaggcctactggataaggcagctgcagatatcgcgcgacgccgccgcggcacagtcgtcggtggcccccgccatcgccgacgtccccaatggactggtggccatggtgggcgacggcatcaacgacgcccccgccttggcacaggcagacgtgggcatagccatcggcaccggaaccgacatcgccatgcaatccgccgacgtgaccctcatgagcggcgacctgcgaggcgtggtgaaaaccctcaacctatcccaagccacgatgcgcaacatccgggagaatctcgcctgggccttcggctacaacatcattggcatccccatcgccgccggcgtgctgtaccccttcaccggctggctgctcagcccgatgatcgcaggcctggcgatggcgctcagctccgtctgcctggtgctgaacgcgaaccgcatgcggcgcgtcacactgagccccgacaccgtctccttcaccgccgcaggcggaagagacgccgacaggaaagcgcccgaccaacacggcgcgcgcaacatcattctcgacaccggagaccgtccccgtgccgatggccatcacaccgatgagggccatcaccatcagccgaacaaggagcaacccatgcacatgaaccacatgcattccgcagacatgaacgacgcgacgcagaccgcgaccgaccctgtgtgcggcatgaccgtcgccgtcaacaacgacgccatcacgcgcgagcacgacggcacgacctattacttctgcggggaacactgcgccaacaacttcatgaaggcaccgcagctgttcctggaaaactgaccggcccgtaaaactgcccggcctgaagaccgaccggaccgtggggcgcaaatcattccgtcgagtactaccggcgctttgatctgcgtcccttgaagtagatgtcgaacacgatccatacggagaggatgaacgctatcacatatcccatgaatcccacgaccggtatgccgaagatgatcggcttcatgcccgcgtagtacacgatcgacgatccgacgaacaggccgacgacgatcaacgccatcgtcagacggttgaccatgtccgacagcaggcgcatcggttcctcggaaccaacgacctccatgttcatgcgcagctggcctcgggtgagcatgcgcatcgcgaccctggactcgctcgccgcggacagcaagccgtgcaatgcctgatgtccctcgacgcccagcgccttgatctcgtctttcgccgctcgatccaacgacttgctgccggcaatatggtcggagatgatctgaatcatgttcacgtcggggatgaattcatccagcaggccctccaacgtgaccaacgccctgccgaccgtcgtcaccgtgcccggcacctcgatgccgtgcctttgggccaacgacgtcagcgacgtcaggaacgccgctatgtccaggtcgcccaggtctaccgtgccgaactccttgacgaccatgtccaggtcggccagcagcgcggggtaatcctcaggattggactcggtgcccgcgaaacgcagcagaccgtccgccagcgcggcggaatcctgtttggcgacggcgaagatcatctcccggagcacgctgcgggcctggctgttgagccgcccggtcatgcccagatcgataagcacgatctggccaccggagatgatgatgttgccggggtgcggatccgcatggaagaaaccgtcgtccagcacctgcgtcgcatagttgtcgaccagcttggtgccgatttccttgaggtcatacccggcttcgatcagctgatcggtatgggagacggcgatgccctcgacgtaatccatgacgaccacgtgctcggtgcacagatccatgtacggtttcgggcagtccatataccgataggcttcgcagaagcgcttgaactcgctgaggttacgcgcctccaccagaaaatccgtctcggattcgaacgtatcccacagttcctcgaccacgccgccaagatccaccacctgcgcactgggcagcatcttcgtggcagtccgggcgatcgaacgcatgatggacacatccaacgccatgatctcgcgcacgccaggccgctgcaccttcacggcgacgtcttcgccggtgaccagcgtggcgcgatgcacttgcgcgagggatgcggaaccgagcggcgtcggatcgatgcgggcgaacacctcgcctatggggcggccatattcctgcgtcaacgtgtcgacgacgatctgatacggcatcgggtcggcatcggcgcgcagcttcgcgagctcgtcgcagaacgactgcggcagaatctccgaccgcatggacagtatctgcccgaccttgacgaatgtggggcccagtgcctccagcatcagcctcatcttcaccggagtgaggccgtgcaccacgtcgaactggttcgcaatgcgcatgatctgtccgaggcgcttgactttcccgcgcctcgtcaggtgatatcggctggagaaggtgtcgcgatgattgttgaacagcccgatggtgggagacccgtcccattcgcggcgtttgccggcacgtcgcgtcacgacaccgtctttcgccgaaccgtccgaccccgatgcggattccccccgttccggatcatgccgtgggtcgccggcatggccgcccgcggtataggacggcatggtgtgctgctccggcatgctaagcagcggagccttccgccggggaaggatcttcggcggcggcaccggcatcgctctgctccttggcgccctcagtcttttcctcggccttctccttggcctcctgcgccttgtgcttgagctcggtgttcaacgccttgccctgttccacggtgagctcgcccttcttcaccagaccgtcgacgatctgctggctcttctcaaagctctgctgccccagctcaacgccggtggccaatgccccaacgcccgcgagaaacacccggcgcaggccttcacccaaatcgaaatcagccatgatacctcctttggttacttgtggttccaagattacccccacccgtcgcataacgcgataggggtggcgtggtttccgctatgagatggaaaccacgccccggcaatccgctcatcggcccatcaagctcatcgacccgtcaagcatcgcagagtccgagggcacggaaccgtccaattcaccgggggcgggcggcggcgaccttgcgggccttgtccgccagagcgtccaaccgtgccagttcgaacatctgctcgctggactggtccggctcgaactccccgtaccgtctcgtcactgcggcccgaatcaggaaatccgcgaccgcggggttcttcggcaacagcgagccatgcatgtacgtgccgatgacattgccgacacgagcgccttccgtatgatcctcgccgttgttgccggtaccatcatgatcgacatgccccagcggcaacgttccctcgcgcaggaacgtctgcccggaatggttctcatagccgatcacgtcgccgaattcgtcgctgtgctcgaccagattgccgatcatccggtggctctgccccaccgtgtacgcgccgagcacgttgatgccgtccaaccgctcgccttccgaggtctcgaagtattcgccgaacagctggaacaggccgcagatcatcagcatcggcgtaccgtccgcggccaggtcgcgcagccggccggcccgcttgaacaggtcgccggtgattttcttctgcccggtgtcctgaccgccgccaccgaggatcatgtccacgcgctcgggccattcgtcgccctgattgtatgcgtgcaggcgcggctcatacccgtacagtgccagccggcgcagaaccaccagcacgttgccggaatccccgtagatgttcatgtccttcgggtagagggacatcacgtcgatcacttttcccatatccgttcacctttcccgctcatgctgtcagtcgccgcgccgttcatcgcccgacgccggcatcggcgacggtggtcagcttggcgagttcggcacgcacgcggagcatcgacgtgtacgtgcagtagatgtgtttgggcacaccgggacgggcggtgacgaactgccgcaccgccgcctccagatccgtgccggtctgctccaccctgacctgatcgtattcgagccgcaacgccatgtcccaggctcgcgtacccgacaccatcgcgacgccagtcgggcgcaggctggtgaaatcgacatcccacagccagctcatgtcgcgcccgtccgcgtacaggtcgcagatggcaatcatcgtgtcatgcccgtcgggcgggaacgagccgagcgacagcctgaagcccatcgggttcttgacgagcagcagctgcacgtcgctgccgttgaccgcaatcgtttcgccgcggccgaacgcgggggtcacctcggcgagcgccgccagaagccggtcatggtctactgggctgtctactgggctctcgtcagatatcgccgcgtctgacgcatgcgaggcctggccgggcatggtttcggcggggacggtctcggcgacctgcgccgaagcaatatcctgcgccatgaccgcgcggacggtggcgagcgccgccgccgcgttgaacaggttgtacacgccttccagcttgacggcggtatggacggcccgcccgtcaatcaggaaatcggcctcatggttgccgacacgggtcagcgtgacatcggccgtcgcctcgcgcccatcggcatcgggggcctcagccgaaaccgatgtgcctgccggctcctgctgcgcgcggtcatttgccgacggcctgccattgccggccacgctcgcggcctcttcggcgacggtggtctgcatgtcgtcgtcggaggggaagaaccgacgcagttcgggcgccagcccgaaatagcgcactccggtgccttccggcacggccgaagcgaaacgcgcgattcgcggatcctcacggttgagcaccacggtgcccgtcgtcgcttcggcgacacgctccagcagacgcgcggtgttgtcgatctcgccgaaccggtcgagctgatcgcgcatcacgttgagcaacagcgcgaaccgcggcttcacctgctgcacgaatttcaccgcatacgcctcgtcaagctcaagcacggccacgtcggcgtccagcctaccgctcaacggcacttcggtcagcagcgccgagacgacgccgcgcgtgaagttggagccggtcggattggtgaacaccttgagtcccagcgtctccagcatcgaggcgaccatgcgcgtcgtggtggtcttgccgttcgtgcccgacaccagcaccacgccatacggcaggtcggcgagcgtgcgggcaaggaaaccggggtcgatctgttcgacgatcttgccagggaacgcgctgccgccgtgccgcagcagccgagaggcgccgcgtacggctttgccgatcagcggcgtagcgaacgcggtccatggacgcgccgcatccgactgcccgcccagcgcctcgcgccgtgtttcacgcgatgtttcacgaggctgggatccgttttcctcacccatcgtcacactccttgatcgctgttgtagtcctgcggcatgtccttgaacttcgagtatgcgcccagaaacgccagatggaacgtctccgtcggaccgttacgatgcttcgccatgatgatatccgcctcgccgggccggtcctccttgtcgtagaaatccggtcgatgaaccagcaacaccacgtcggcgtcctgctcgatcgagccggattcgcgcaggtcggacagctgcggcttcttgtcgttgcgcatctcgggcccacggttcagctgggacaacgccacgaccggcacttccagctccttggcgagcagcttcagcgctcgcgagaactccgagacctcctgctgtcggctttccacctgcttgccggatgacatcagctgcaggtagtcgataacgacgagcttgaggtcgttggtctgcttgagacggcggcatttcgcacggatctccatcagcgacatgttcggcgaatcatcgatgaacagcggcgcgttctgcaacttgttccagaaattgttgagcgtgttccaccggtcggcggtgatgtcgtcggcgcggcgcatcgccgcgagcggaatgttggtctcggcggagatgatgcgctgcgcaagctccaccttgctcatctccagcgagaacacgatcgacgtcatattgtgatgcagcgcggccgcacgggcgaaatcgatgcccagcgtcgacttgcccatggcggggcgccctgccacgaccaccatctggccgggctgcagaccctgggtcacgtcgtcgatatcgcggaaacccgtcggcacgccggttttcaggtcgccgttctgcagcttgtcgagctgttcgagcgcatcgtgcaccaccgggccgatggcctcgtagtcctgcttgacgcgtccggtactcatctcgtagacctcggcctgcgcgaggttcaccacgtcttcggcctgcgagccctccgccgagtagccgagctgcgcgatcttggtgccggccgcgatcacgttgcgcaatatcgcccgctgatgcacgatctcggcatagtacgtggcgtttgcggcagtcggcacgaacgcgacgagcgtgtgcagatagtcggcgccgcccactttgtcgaggtttccgtccttcatcagctggttggcgacgatcaccacatcgacgttctgcgagttcgagaacaggtcgatgatcgcctcgtatatcgtctggtgcttcggctggtagaagtcggtgacgtcgatcatctggctgacctcgccgatggcgtccttgctcagcagcatgccgccgagcaccgccatctccgcctcgtcgtcgtgcggaggcacgcggtcgaacacggcgtcgcgtcccggcgaccccgcgtcgccctgcacatacgagccacctgattgcgggcgcggccctccccaattcgtttcttctgctgccataagacttgagtatatatcggagcttttccggtggaagatatctggcgaaaaatgcacagggccatctctcggacggcatgtcgcggtaagcggacgcgacattcgtcaccgtcacgcacggcttgctcgcaagtcatattcagccggcgtttacctgcgcgacacgcacgggtgacgtcatgtggacaaaaaagttgagttatccacatttaggggataactctggggataacatatgcagttatccacatcagggggataactctgtgcataacatggggataagtccataaacgcccccactcgatttgccaaacacgtcgtcatgcgatataagcggcgccccattcggctcaccgccgcgctttcagctcttcgatgccgcatacgcgcccgcccatatgagctacagtgtgcatgtgcacacccctgacccacaatcatccgatcctgcgaccgccggcacggcccgcaccggtaaccgagccgcatacggccgcatactcgcgctggccctccccacattcggccagctcatcgccgagccgaccttcgtgctcatcgacacggccatcgtcgggcacatcggcgtctccgccctggccggactgtcaatcggatcgaccatcatcctcaccgcggtgggactgtgcatcttcctcgcctactccaccaccgcgcaggtggctcacctgcttggtgcgggccgccgccgagaggggctgcaggccggcatagacggactatggctggctctcggcatcggcatcgtgctggcggcggctctgttcgcaggggccctgccgctgtgcgtggcgctcaggggcacgggcgagacgctcgaccaggcggtggcgtacacgcaggcggtggtactcggcgcccctggcatgctgctcgtgtacgcggcgaacggcattttccgcggtttgcagaaggtacgcatcacgttggtggccgcggtgtgcggtgccgtgctcaacaccatgctggatgtgctgttcgtgttcggattcggctggggcatcgccggatcgggcgcggcgacgatgatcgcacaatggttcatgggactgttcctgacggttccggcggtgctatgggcgaaggccgacggcgctgcgctgcgaccacgcctgtcgggcatcgccgccgccggaggggatggcctgccgctattcatccgcacactcgccattcgcgccgcgatggtgatgacggtcgcctcggcggcccgattgggaacgacagtgctggcggggttccaggcggtgaactcgtcttggaatttcgcgatgaatatgctggattcggtaggcatcgccggtcagaccctggtgggcgcggcgatgggcgcaggagaccgcgcacgcacactgcgactgacccgggccacgggacgagccggattggcggccggagccgctatcggctgcggattcgccgtggccggcctgttcgtcggccgcctgttctcgcccaacccgcacgtccagttgctggtcgccgccggcatggtgacgatgggtgcgttcctgccactacaggggtggatgatggcgctggacggcatactgatcggcgcccgcgatttccgctacctggcgattacctgcacactgaccgcaacggtgtatatcgcattgaccgcgatctgcgtggatgcggccgcgcccatgctgcccggcgacctggcctcgacagtgctgctatgggcgatgttcaatatcgtgctcatgggcggccgcggcctgttcaatggcctgcgcatacgcggcgaatcatggctcggtcagaccgccctctaacgaccggcccgcgacagccctcgctgcactgcggaacacccaccttgacatcacctttgcctcagctgagcatcatatgataatggcatcggctcccgaagatgggagacgccacgcggaaggagattccgccccgaatcagatgacatccgaatactcacagataagcaaagcatgatcgacgtgcgggagaaggccgccaagcagttcagcgcgcgcctgaccggtcgcgggttcgaaagctgggtgcgagagggcaacgacacctatgtggtcggcggtcaggaatacatgccgcaggacctggtcgtggtacgcgccctcgacgcggcgggcaatcccgtgtcagccgaagtcaacgtcgacatagccaccttcaacctgtacccggatactctcacgggcggcgctgtacatggcacgcaccagactttcgcgccaatggctccacccgtatcgcttggatatctcctcaccggccgtagccccgagcgacgacccgtcggcgcgggtcaggtcatacagcatgtccagcagcatcggatcacggtccacgcaacgggcgagcgactcccccacggccggatcgttcgggttcttgccggtcgcgaactcagagagcgtcagatgctcccgcaccaggatgcgcacccatcgcgcgatgtccgcgtcgaatcccatgcgcttcatgatcaccgcggcgtgacgggcgccctctgccgcgtgatcggtcacgaacggacgtttgccgacatcatgcagcagtccggccaatagcagcgccgtgtagtgacggtcgtcataccgctcgcctcgcgccgccgaaacccgcgcgagccgtgacgtcacctcgacgctgtgccggtcgatggtataccggtgcgctgcagacgcgctcgggcgattgcgtatgcccagccattcaggcatccatcgaccgggtatatccacgaaatccagttcctcccacacgcgcatgagcgccggcccggaggccagcagacgcacgaacagttggcgcgactcatcatcccacacggaatcgcggatcgggcagcgccgcaggttctgcaaggtgaccgggctgatcggcagctcgaactcggcagccgccgcggccacgcgcaacggcagataccggtccggctccggttccacgcccggagccagcacgatttcctgctcgtgcttggccacgccgggcgcgacctgttcgaacttcggggcctctcgcctgcctccaccgcgcggcgacagcatctggaagaacgagaaacgcgggcgctcatgcgtcagcgaatgctcggcacgcgacgccgtggaatccagcgcgaacgcgatctgtcggcctatgcgggcgagccgggtctgcaagtcctcgatggaacgcgcctcccgctcccccggcggcagtgtcgggtcggcaagaccccgcatcgccgccacctgcgcctgatatggggcgagcagccgattcgcgtccttgccggcagccagatgaatgcaatcgcgcacgtccagcaacgcctcgacctcgtcgtcataccggccgtgcggtcggtcggcaagccatgacacagtcaacgcggagaccagcaccgaatcgcgcagaccgcctcgcgcctccttgatgtcaggctggttcaggtaggcgagtcgtccgaactcgtccagtcgcttgcgcgccgaattcagcagttccggcagccgcttgcggaccgctcgacgccagcgttccagaatcgacgtggccgtcgccgaaatcagcgccgtatcgccggcgatcggcttgacatccagccagcccatagcggccggcagatcggaatcggtcacggcctcgcactgctgccgcgtgcgcaccgactgatcgaggtcaaggccgctgtcccacaggggataccacagtttgttggtcagctcattgagctgttggtcgttgatcgtatgtggctcatagatgatgaccagatccaggtcggagctcgggccaatctgcccccgtacgagcgacccgaccgcgccgaatccgatgccggtggacggcacgtcgaacggcaccgcggccaccgcgtcactccacaggcagcgcaggcaatccatggcgagctccgttcgcgcccggcgcttcgcggagccaccccggtacacgccgtcagcatccggctggctcatgtccatgaaccgttgcttgagatgatcgaccgccgaactcaagacacaccaccttcaccaaattccgccccgcaggcgggggctgtcggtggagccgactggaggtggtcaaacccacccgggtgcacaagaccaccctcagtctcgctacgcgagccagctcccgccagcgggagcaatttcaatccttgccctccgccaccggaggcaaggatgtcgatatataaaagagtccccgcatggtcaggtgacggtgtgcggggacttgtcttaccgataacccgcgtccggcggaaagcgccgaaccacgggccgctttcagatcgcggcggagccggtctcgccggtacgcacgcgggtcacggaatcgagcggggcgacccacaccttgccgtcgccgatcgtgccggaaccggcagacttgacgatcacgccgaccagggtctccgcgtccgcgtcatcggacagcacctcgacgcgaatcttcggaatcagatcgaccgtgtattccgccccgcggtacacctcggtgtggccacgctggcggccgtaaccgttggcttccgagaccgtcagaccgtgcacgcccgcagcggcgagcgcctccttgacgtcatcgagcttatggggctgaatgatggcagtgatgagcttcatctcacctcacctccttgagaaccgagctggcagtaccagcaaaatcataggcacgttcgccctgatcggccagatcgatgccgccgacctcctgggcttcggtcacacgccagccgatggtcttctccagcgcgaacgcgataatcgcggtcaccacgccggagtacagcatcgcgcacagggcgatgatgacctgcacggccagctggcgccagtcgccgccggcgagcagaccagtgtcctcgccgaagaagccgatgagcacggtaccggtcaaaccgccgacaccatgcacgcccaccacgtcgagcgaatcgtcatagccgagcttgaacttcaggccgcatgcgaagcagcacagaacgccggcgatcgcgccgatgaccatggcccacaacggtgacaccacatcggccgcgggggtgatggcaaccagaccggcgacgatacccgaggccgcgccgatagccgtgtaatgaccggtgcggatcttctcagtgaagccccaggcgagcatggcagccgcggtcgccgcggtcgtgctcatccacgcatagccagcggtgccattggccgcgaacgccgagccggcgttgaagccgaaccagccgaaccacagcaggaacgcgcccagcatgacgaacggcacgttgtgcgggcgaatcggctgcgtgccgaagcccttgcgcttgccgatgatcagcacgatgataagggccgccattgcggcgttgatgtgaacgaccgtgcctcctgcgaaatcatgcgccgcggcgccgatcgcggtggagatcgggccctttgcgctcagaaggccgttgttccacaccatgtgcgccatcggcgcgtagtcgaacgtgacccacagcgccacgaacagcatccacgtgctgtacttcacgcgctcggcgatcgcgccgcagatcagcgccacggtgatcatcgcgaacgtgacctggaacgacacgtccacgctgctcgggtacttgttgccgttcgcggcaaggccggcggccgtgtactgacgggtgccggcgtcgaacaccatcgtgtccttcagcaggaacccggtcgcagggtcaccgaaaatgccgccgatgctgctgccggcgtatgcgatcgaccagccccacagcgtccatacgaccgcggtgaccgacagggccgccgccgacagcatcagcatgttcagcacggctttggcgcgcaccataccgccatagaagaacgccacgccaggcgtcatgaggaaaaccaaggctgcggatgtgagcatccatgcggtattaccggagtccatcgttaccttcctctcttgttcgttcccgccgccgcgcatcttgaccgcgcgggaagcgggtcgttaccacttcatctgacatcccctgatagggggaatcaacacaacgatatgcaacgctcgctgagttttcaacacgttacggcacgttacgctcatgtaaagcgcgatgacgcgggtcttggctttcggccggattccggcgcaggcaacggttccggaatgcaaaagccggctgtccacgttgtggactgccggcttgcagggttcatgtccgacggtttgcgaacaacctcacgcgagaatgccgtcgacgaatccttccgggtcgaagggcgcgagatcgtccggcccttcgccgaggccgacgagcttgaccggcacgccgagctccttctgcacggagatgacaatgccgcccttggcggagccgtcgagcttggagagcacgacgccggtgaggccaatcgcctcggcgaacaccttcgcctgcgccatgccgttctggccggtggtggcgtcgagcacgagcagcacttcgtcgacgggcaggttcttttcggtgacacggcgaatcttgccgagctcgtccatcaggttcgacttgttctgcaggcggccggcggtgtcgatgatgagcacgtcggcgtcgtcctccttggcgcgggccgccgcctcgaacgcgaccgatgccgggtcggcgccgtccttgtcgctgcgcacgacgggcacgttgacgcgggcgccccaggtttcgagctggtcggctgcggcggcacggaacgtatcggccgcgcccatgacgaccttcttgtcttcggagacgaacagacgggccagtttgccggccgtggtggtcttgccggtgccgttgacgccgaccatgatgatgacgccgggcttgtgcgcgtccggcttgtcgacgttcagacggcggtcggtgtcgcggccgaccaggtcgagcaggttgtcgcgcagcgtggcgcgcacctcgtcggggcttgccttgccggtgatgcgcgcatcgcggcgcaattcgccgactagctgctcgcttgcttcggcaccgacgtcggccagcagcagcgtgtcctcgacgtcctcccaatcggattcggagaggttgtctttggtgaggatgttgaacaacgccttgccgaacggattcgaggacttggaaagtttcgccttgagccgctgaatgcgcgagccggatttttccggtacatcatatgcgggagccgccggcttggccgaggcggcctgcgtcggttcgaccggcttacgctctccctcacttcgaggggaggcggtttcgccctcggtttcgggagcagggagctgcctgtcaactgttgcggcgaccgtctcgggttcttcacccgcacgacccgcctggcgcggcgatgttgcggtttccgccggccggccgacgacttcgttcttacgcgacttgccgcgtactacgccccacacaatgagcaggacgacaatcaccactgcggcgacaatgccgataatcagattcgtatccatggctccagcctaaaaaccgcaacggacagctgccggaataccacatacgtcgcattgttgcagccaagtcgacgactaattgggctgctggcacagacgctgcccctgagtcgtccctacatatcgaaccggggaagacgctggtataggcaaatctgccaccaatgcataaagcggcataccagacggcaccggattgccagcggtcccatgatattcaacatagaacaagtcgggcaatggcgccccaccctcatcgtggtaatactcgcgaccgccaccgaaaacacgtatcaaacaggacacgcacgacacgatgtcatggttgtcgaactcgctcgccatcatcgacggggctacatacgtcttcatgatcgactctcctcagccgcacggccctcgcacgacctaccacgaaaacgtagacccgacaacatttcgggaggtataggcgctaggcaccgcgaccactacactggagctcatggccaatactgcaagaatgacggcgctgcaacgccgcgaacagctcatccgcgtggggcgagcgttgttcgcatccaaggggttcgaggcggtgagtgtcgaggagatcgccgcgaacgcgaaggtcagcaagccgatcgtctacgagcatttcggcggcaaggagggactgtacgcggtaatcgtcgaccgtgagatgcgcgagctgaccaatgcgctcatcgaggcgctgtccgacaccaaggcgcacccccgccagatcgtggagcgcgcggcactcgccctgctcacctatattgaggagaactccgaaggcttccaggtgctcgtgcgcgactcgccgaccaccgacccggccggatcgttcaactcgctgctgggcgacatcagcctgcgcgtggaggatctgctcaccgccgcgttcaaacgccggaaactctccgccaagggcgtgccatactatgcgcagatgctggtcggcatgaccgtattcaccggtcaatattgggcggatcggccgaaggtcaacaaggagcagctcgccgcatacgtcgtcgacctcgcatggcacggcctgagccggctggattccaagccgatcctgcggttcgagagccagaaggcgaagcagctcgcagccaaggaagacaaagaacgtcgagacaaagagcggagcgagacaacggtcccggacgagccggacgctcctgtcgagaccgccgaaccggacgaaccggcatacctgcccgcgagcgccgactgatcatcagaaccgcgcacaagccggaagcccaaaaaacggcggaacggacgacgggacttgcctgaacgccgcttagtgatagctttgcttgtagaggttagactcgctgcaacatccgaggcgacgtgtcgcacgtcatccccgcgacacctgtataacgaggaactatggaacaatcgtcgaaaacactcaccttcgtggtgcccgcctacaacatggaaacgtatctggagcgctgcgtggagtcgctgctctccgcgacggacaacagcgatatcgaagtgttgatcgtcgatgacggatcctcggacggcaccccggaacttgccgacatgtacgagcggcgctggcccggcaacgtgcgggcaatccaccaggtcaacaagggccacggcggcgcggtcaacaccggcatcgccaacgcgaccggcatgtatgtcaaggtcgtggacgccgacgactgggtggatatgccctccatcgacacgctcatgggcacgctgcgggtgcagcgcgtcgccacggatccggtcgacatgatcgtcaccaattacgtgtacgacaaggtgggcaagcgcgtcaagcacacagtgaacttccgtcatgcgatggcggccaacaccgtgctcggctgggacgatctcggctgcttcggcgtcgccgaatacatactgatgcacgctctgatctaccgcacccaggtggtgcgcgactccggcatgcagctgcccgagcacacgttctacgtcgatttcatctacgcataccagccgttcccgtgggtcaaatcgatgctgtacatggacatcccgttctaccactacttcatcgggcgcgaggggcagagcgtacagaccgacgtgatgatccgccgcgtcgcgcagctgcggctcgtcaaccagcgcatggtggaggccactcccgaaccgggaaccgtgccggacggcctataccgttatatgattcatttcctcgcgatcgaaagctcggtcacgtcggtgttcctgatcctgtcgaaagacaaggcaaactaccgtctcaaggacgaactgtgggcggacatcgacaaggcgtcgccggccatcgggcgtgacgtgcggcgcaagctggtgtcgcgcgcgctgaacctgcgtgggtctgtcgggcgctgggtgatccgacgcggctatgtcgtcgcagagaaggtcgtcggcttcaactgacgtgccgcgcggcggggctgccagctgatattcgcccctctatcaccgatcaggagaacgtccatgatgcaattcaccacgtctggaaccatgctgcgcttcgatgagacgacgctgcggttctcattcagccgcgacggtgcgacctggagcggctgcgacggcatagagccgcagctgacgcgcgaggatcgttcattctcgttcgccggcgccgctaccgtcacgcatgagcggatcgagaccggcaccggagtcggcgtgcgcagcgtgttcgccgggttcgcgggtgcggattacgcttttgagacgtatatctggatcgagcggtcgagcggcgacgtgctatgcgaatgggtgccactgcgcgagtgtggggccgagccgcgcatcgacagggtgctttggcctgcgccgctgtccttcgaccatgcggacgcgcatgacgtgacgctcatcacccacgagcagggcgtgatgataccgaataactggcctaccgaggtcggcactgatgcggtctccttcggcgggcggttcgagactgcgggcgggtacatgccctggttcgcgcagttgcgcagcgacgggcatgcgtacatcgccatctgcgagacgccgtggaacgcaggatatgacatcgaccatccggccggcggaccgtacacgcacgtcggaatgtggttcgagccaagtctcggccgcatggattaccgccgtgtcgtgcgatatcgtctcctcgaccacgccgaccataccgccgtctgcaagacgtaccgcgcttacgtcaacgaacgcggccggctgcgcacgctggcggagaaggcggcgcgcaacccgtcggtgcgtgacctgctcggccgttcatgggtgcatgtcggcatcaagacgaaggttcagccggactcgtcgctctatgatcccgcgcagcccggcaagaatgattcgctcgtcacattcgcgcagcgcgaacggcagatgcgcacgctgcacgaaatgggtgccgggcggctgtacctgcatctggacggctgggcgcagcccggctacgacaacggccatcccgactatctgcccgcatgccgcgaggccggcggctggaagggcatgaaatcgctggtcgacgcctgtcatgagcagggagacctgttcggcacgcatgaccaataccgcgactattacttcgccgcgcgcacgttcgacccgcgcaatgcgatccgactggcggacggcacgatgcccgagcacgcgatgtgggccggcgggcgccaaacgtacctgtgcgccgagcttgcgccggattacgtgcgccgcaacttcagtgagatcgccacgcacggcatcgcgctggactgcgcatatctggacgtgttcacctgcaatgaaggcgacgaatgctcgcatcccgagcaccgcatgacccgccgcgaatgctacgagcgccgcgccgaatgcttcgaatacctgctggcgcacggcattctcacctcgtccgaggaggtgtccgactgggcggtgccgagcctggtgttctgccattacgcgccgtacgacttccagatgcgctcccccgacgcgcctcggcacggcatcccggtgccgttgtacaacctcgtctaccatgactgcgtgatccagccgtggatgatggatcgggtggccggtggcgacgactacatgctgtacgcgctgctcaacggcggtgcgccgtacctgatccgtgacgccgcatatgccggcatggacggtgatatgaatgccgcactgcgcgcccgtaccgagaacgacatcgagcggtgtgctgtcgtggccgggctgcaccggcgcgtcggcatgcaggagctcgtgcggcatgaccttgtcggcggtgacccgctggtgcagcgctcggtcttcgccgacggcaccgccgtgacgtgtgatttccacgcgcagacgtatgaggtagcagcgaacggttctcattaagaaaggtgcgaggattccgcacattttcgaacaagcgaacattgcgtagaaagcccggaattccgggctttctgctgttttcatgttcgtttcccccgtcacacggactcgcacctttcttattgagaaccgttcgctgcgacaagggagcaagccctcagacccacctatcggacatggcgaacgagttgcgcatcaggttgctcgacgtatacagcacgttatcgagcagcttatgggtcagatcctgcagacgaccggccatcgtctcgttcgcagccatgagcgccgcgcggatgtccccggcttcggcatcggcgagcgccgcatccgtttcttcgacgagccgatgcccgaacgcccgcacctgctcgccatagtattcgatcgcgttgcgcgtctcgtaccagtgcgcgtcggcaattacggcgatcagacggttcgtccagtacaggttgtcggtggagacctcgggcgtggtgtcgcgcagatacgccggagtgtcgtccacgttcgcataaaaaggtgcgaccgccgtgaacgggccggaaccgaaggcgatccacatcaccgccgccgctgcggccggcacgtcgtgccgcagttcgatcgcgaccatgtgaccagtgcggttgatgccgatcggacggtagcgatgccggctttccggtgtaccaagcgttccgtacgggtcaaaaggcgtgccttcgaaatgcgacgacatcagaaagtcgatgtcctcgaccgtcaccttgttctccggcgcccggcaccacgggatgtcgtcggaggtcggcgtgtagcgggccgcgggcgaatcccaatcctcgctcgggttcaggtgacgttgcatgtaccaggcgcgcggcgtgttgtagatatggtccttgacggtgctggtgccgaacaccgcacgcgggttgatgtggtccggcagcacggcggcgacgccgaaaccggcgccctgcgcgggccgcatggcacggcccagatggtgccgatcgatgaattcgcgcaggtccgcgctgcacatgaagaaccgccgctcgccgaacgcgtcggagaagtcgaagtcgtcgatgcccagctggttggggatcgtcgcatagcagtcgtcgggcacacggcgcgcaatccagtgatgcccaccgattgtctcgacataccagatctcgtccacgtcggaaatgatcacgccgttcgactcataggtgccgtaccgttccagcagctcgccgagccgttccacgccctcgcgggccgaagagacatacggcagcaccagcgtgatgatgtcctcctcaccgatgccgccgggggtctccggccgatagccggcctctcccggcacgccttcggctggcctgagctcgaccagcgggtcggcggcgagcacgcgctcgttcaccgcgatggtttcggtggcgctcatcgccacgttgcgctcgcttgcgccggcctcggcgagcacgcctcggttcggcagcacgttcggcgcgatggtgtagcggcacgggtcgtccggcaggtcgatctcgacatggctgagcgtgctgcggtagtggcgcggctggtccgtcggagccacggccacgagccgcttgggatcgtagcggccggagccggaatcatcgttgcgggcgatgatcgtcgcgccgctgcagctggctgattttccgataagcaatgtggtgcatgacatgccgaccactgtaggagccggcctcaccatcgcgcatcaacgggacggctgcggcagaaaaaatactgcggaaggccaaatattatgtcatctcagccaaatacgcagggtttcacacgaatttttcaggtaaaccacatgacttgccccgaaacatgcgtttatatagtaatcacgaccgcaaggccgcaataactgaaccccttcttctcttctctctcaagcccggcttccccgccgggctttctctttttccgcgcccctccatcgcggtgtcgcacttcaccaaaacacgggttgaaatagccgttcttgataattccccgtgtcaaatcgccgttttcgggccacaaaacggcgatttgacacggggaattgcggatttcggctatttcaacccgtattgtggcgccccggcccacgcatctaggcaaggcatcgcaatcggcgcagtttgtctggcgcgcccgcccgaccgcacaggcgggaagccccgccgaggccggcaccgcacgccagagccgctccggcaagctgacatccccgatctgatcaacatcggcgtgttctccgcgctgtacttcgcgctggccgccgacctgattgccaaagccggcaaatactccagcaagatcggcatcctcatcagctacgtggtgttctcgtacggcctgaccaggctatggttcatgaaggacgccgcatacatcgacggcgtgttcgcgaacatcaacaccggcacatcatgaattcacgggcaacattcgagagcagccatgcggggcgaatcggcgcatatgcagccggcgcagacggcatgagcagatccaagtccgctcccgcgccagcggccgtcgtcctcggccctcgggcgaaactgtatctgatgctgctcgccaacacgctgttgttcttccacgcggatgcgcgagccgaagcgctgctgacggcactgttcctcacgccgctgttccttgccggacgctggcgtatgggactgcggctgacggcctgctatgcggttctgctggggtggggattgtggtcggacgcggcgacgctggacacggcggggcttcgggcgccgcgtcagcctccggctctgacgccgacgcctggatacatgtcgtcgggctgttttccgtggggcttcgcatgatgatgccctgtttcatcaccggtgcctacgcgttctccaccacgcgcgtcagcgaattcgtgtgcgcgctgcgtcgtatgcgcgtgcccgaatcggtggccatcccctgcatggtggtcatccggttctttccgacgatcgggcgggactaccggcgaacccgcgacgcgatggcccttcgcggtcttgtctccggccgactcgcgctgctgcggcatccggcccagtcgctggagttcgtgctggttccgctgttgatgaacgcgacgatcgtctcgcatgacctgtcggtcgcggcacttaccaagggattgggacggcccggccggcatacctgcataacggagattcacagcgttggtttgattgggcggcgatggcggtctgcacgatcccgctggcactgagcatcggcggtgtactatgagcgatgtgatcatacggttgcgcgattgctcgttccgataccgtcaggccgatgcggattcggaggatggcgcctcgccacggggcgccgcggcaggagagcgccggcgtcgaaacggcggccgacgaggccgacggattcatcatcgactggctggtgggaccggatcgttcactgggccgctaccggtatcggcttgaccggaccatcgccaaggggttggagggcaaaccctgttatgtgtttcatgcgacggacgcgccggcaggctgcccgttcagtgtgctggtggcgatggatccgatgcccgaacgggctgcgctggcgagcggcggcctgctcagtcatctgcattttcagtacgccagcgatgacggaatgctgttgagggcggagtccacattgcgcaaacgcatgtggtacccgacgatgtgcgccgacgaaggcacgctgcgcgaccaatgcgacatcgtgcgggccctgcacaagttgcctccgctcgaccgcgaggcataggctcatcgccggcatgatcgcccgtcgatgagccttgacgtgtcacgcgaactggctgttgtacagtgcggcgtaacggccgccgcgttccaacagttcatgatggttgccgtgctcgatgatgtcaccatgttccatatacagaatcaggtccgcgtcacggatcgtcgacagccggtgcgcgatgacgaagctggtgcgtcctgccatcagtcttgtcatggctttgccgatttccgcctcggtccgggtatcgacggagctggtagcctcgtcgagtatcaggatcggcgggtccgcaaggaagacgcgggcgatggtgagcagctggcgttgcccgaccgacaggttcccggcctcgttgtcgagtacggtatcgtagccgtgcggcagcgtgcgtatgaagtagtcggcgcgcacggctttggccgccgcgatgatctcctcgcgggtcgcatcgggccgcccgtaggcgagattctccgccacggtgccgccgaacagccacgtatcctgcagcaccatgccgaattcgcggcgcagatcgcctcgcgtcatggcggctgtggatacgccgtcaagcgttatcgcgccgccatcgatctcgtagaatcgcatcagcaggttgatcagcgtggtcttgcccgcgccggttgacccgacgattgcgaccttctgccctggctcggccacgaagttgacgtctttcatcagcggccgttgcggatcgtatccgaacctcacgtggttgaacaccacacggccctgcacaggctcctcagcgatcttcgccgcgtcagctggctgggggtcgggccgttcctcttcctcgtccaacagctcgaaggtgcgttcggcggacgcgagcgcggactgcagcgagttgatcatgtagctggcttcggtcagcggttcggacacctggttgatgtattggtagaacgcctgcgccacgccgacggtcatgcggccgccaagtaccatccaaccggcgagcagcatcaccgccatctgcgagaaccgcgcgatcatgcggatcagaggattgacggatatcgtgatgaagtcggcgagctgcgcggcttttcgggtgcgttcggcggcgtcctccatcgctgccgcactgtcttcctcgcgattgtatgccttgatgatgttgcggcccttgtagtattcctcggccaggccggtcagctctccgatggtctcctgacgcaatgacgcgatctcgaggttcttgcgggcgaccagtttggttacccacatgctcaatgccatgaacacgaggaacacgaccgtgagcagccacgagtagtagaccatgatgaccagcgagccggtcaccgtggtgatggcagtgatgagtcgcagcaaccccgtctgcatgacttcgctgatacggtcaagatcgttggtgaccttgctcagcacttctcccggcttattgcggtcgaagaagcgcagcggaagccgctggatcttcgcgctgatctgcttgcgcagcgtcaggttgaggttttcggccacggacgccatcagataggactgcaggtagtagaagccccactcgccgagatacaggattgccagaatcaggatcgtccagccgataccgccggcgttccagcttactgagaacggaacgccgtcacgccatgcgccctgcacggcatcccatatcgagtccaccacgacggcgctgtacatcggagcggcgatatggaaaaacgtgaacagcagaatcgacgcggcgaccacgcacaggcgcacccgctgattgcccagctgcacgaacagccgccgggctgtggccatcgcgttcttcggcgcttcgagctcgatgtcgtcggtctttaccgtgtcgcccgcgttcacaacggtttccgtcatatcgtcattctgcgttgtcattctcgtcacgcctcctctcccattgccggctccttggtctgcgattcgacgatttcgcggtacacctcgcagtccgccatcagttcgtcatgtttgccgatgcctgccacttgtccgtccgacagcacgacgatctggtcggcgtgctggacggtgctcacgcgctgcgcgatgatgagcaccgcacgcccgttcgtctctgcggcgagcgcatgccgcaacgcggcgtcggtcttgaaatcgagcgccgagaaactgtcatcgaacaccaccagctgggtgtctccggtcagtgcgcgcgcaatcgacagacgctgcttctgcccaccggagaagttcgtaccgccttgcgcgacgcgggattccagtccttgcggcagcgaatcgacgaactcgcgggcctgcgcgacatcgatcgcatgattcagccgctcatcggaggcatctcggtctccgtaccgcagattgtcggcaatcgtccccgagaacaaccacgcctgctgctgtacgtaggacacgcggcgccgcagatcgtgctgcgtcatcttgcgcacgtccacgccatcgagggtgacttctccccaattggcgtcatggaaccgcagtgcgagcatggcgatcgtcgatttgcccgagcccgtgccaccgatgatcgccgtggtctggcccgtcttgcaggagaagctgacatgtcgcaacgtgtcctcctgcgcgtccgcgaaacggaatgtcacatcgcggaacgccagcacctcgccgtccgggagcggaccgcgaccgctcatatccaccgccgcgcccggctccgggtcggcgatctgcggactgtggtccagcaccagccgcacacgctcgcagcattcaagcgccctcggcaaggtgatgatcaccatctgcgccatcatcagatagaacagcgccatgatcgcatactccacgatggcggtgatgtcgccgatttggaagtttccggcgctgatgcgtcctcccgcgaggaaatacacgacgacgatgaatgcgttcatgccgaagtacgacaggccgtcgaggttcgcgaatagccggttcgccttgatggacgtatcggcgtagtcgacgaacgtgccgtccatgcgccgccgctcatgggattccttgttgaaggcgcggatcacgcggacgccggtaaggttttcgagtagcacggcgccgatgcggtcaagcagtttctgcagtttgcggaacaacggcgccgcggatcgcatgatgaacagcgccacgacgcacacgaaggctatcgccaccagcagccacagagacagggtcacgtcgagccggaacgacagggtcagcgcgatgatgaatatgatcggcaccggcatcagcatgcacagcacattggtcatggccatctggatgttgaccacgtcgttgatcgttcgcgtggttatcgatgccgtaccgaaattgcggaaatcatagatcgacagatccatggatttacggtacagagccatgcgcatgtccttgccgacgcgagaggtcaactgcgagcagcaccatccgcccgccacggcgcacatgccggaaatcagcgcggccacgcccatgccgaccgccgtgatggtcatcttcttgaatgatgcggatgtcgcgctttcgttcagcagctccgcggcgaatgtgggaatgaccagcgcgccgacgacatcgaccagcagcagcaccgtcgtcaccgcgcacagcgcccagtatggcttcatgaaacgggcaaccagccgcatgcttcttccttcccctcgcgaaatcgtctacgctcatatctcagtattgtcccgaagtaggacaattgagccatacggcgtggcgaagtccgagacgggaaaactacacggaaatgtcatgcatctgtttgcggaacacccgcccgtagacgcccatgcccttgagcaacgcgctgcgcagctcgtcaggaagctcgctcatcgcccgatactccgcggcgcgactcggcgcgatcaagctgttgcaatatctgcgcccggcaggcgtgaaacggaccgttttgacccgacgatcgccttcggcgtccccaagctccacgaacccatgcgccacaaacgatgcgatgacattgttgaccgtctgccgcggcaacagcgtgtactcgcagatcgcccgctgcgacgccccatcatggtccttgaggtagtccagaatgcacatcacattatccgacactccggctcggcgagcgtaatccgaatacgccacgtcaatgcgatgcaattcatcgaagaacaaatcgatatgactcgcgatcgatgacgcttcaatatcccgagccatgtctctctcgccgccatgccccacagcggcattctctgaattgtccgacataaggacaatcatacaggcatttcagcgattgcgccagagggaacgcctcgctgccgcaacagcgccggcacacgattaaaaccctccattgaagccacggctcaggaagccattgcgtttgttctgtctcaatgtcccgggcgacacacgcgagatggttacgccgatgacgcacacgaatggaacagcaaaggatgcgacaaatgatcacgatgaccgctacgccgcgccgacagcacacgatcagagtgtcggccgaatgggatacggcaggggaatgagatcgccgctagcgtcatagaactcacgtaggtttatggagcgcacgcccatcgcctcgaccacatcgggaatcttaggctctttcttcaacgggttgttggggatgggatgtattgcttgctcattggtgacgacaatgatccggcgggacccaccgggcggcgcagcgttcgatgcgtttcctgccgatgatcagcgccagcagtccggcgttgcggaagatctcggtcactcccctgcctttcccgtgttcgcggaggaagtatcttttgaactcgtcggaatagatgatgcgcgtcggagtgacgttggacacggcccacaggccgcgcaggtacgaggttcgtcaggagtgaactcccttctcatcgccgttcctttccgtatgagacgccatatacggcaaaggccggcatcccatggcggtttccatgggatgccggcctctcggacggacgtccccttgagggagaaggacccgaagggccggggcatccgtcagaccgttcaggcgatggtgctcgccttgcgggacttgacgccgacggtcacaccggcgccgatcaggagggctgcgaccacggtgaacagcacggtgcccgcgccgccggtgagcggcagctgggtgatgctcttcacgttctccacgaccacttcggcggtgctgccgtcggagaccagtccccaacgatcgctgctgacgccatcggcgtcgatcgtgtaggacggtttcgcggtctggtccgcgccggtgccggagaggttggccgcgatcgtgaagctgaaggacacgcccacgttgacgtagccgttcggggctgcgatctcctcgatggtgtacttgccctcgtcaagggccgtgaaggtcaccttgccgttcgggtcggtggtgaacacgccggagagggtgccgtcggcggtggattccggcttggtgtcgagggtgatccacttgccgttgccgtcctggtcgcgggtgtaggcgaggtacttgccggcggcattcttgatggcgaacttggcgccctcgagcgcagcaccggtggtcttgtccttcttgaccagggtgtagtcgaagttgaagaccttgaccggggtgcccggcacttcctgcttgctctcgttgttgctcggatcgttcggatacttgatcgtcggggtgttcgcggcgccggtgttgccggtgctgccggtcacggtggccttgtattcgacggtcacggtcttgccgaccaggtcggcgtcggtgaacttggagtcatcgacgggggtgcccttgaagcccttggccttgatgtagccgctcaggtcgatgatgaaggtcttggacgtggcgtcgaagccggcgaccgtgtagtcggtgccggccctcagctgcttgttatcgaccgtgaccttcagggtgtcggtcttgtaggacagtggcgcgttgtgcgcgaacttatcggacacggtgaactggtaaccgttgaccttgtagcccacgtagttcggaaccttggtcgtgatcgtgtaggaggcatcctgcccggctgcgacggtctggtcggtcacggtcttgctgaccgacgcggtctggttcttcatgtcgatggaaccggaggagtacaccgtgttgttgatggtcagcttggtgccggcgaggatcggcagggccttgctgctcttgccggtcacgacctggtcgacgatcagccacaggcccgggctgtccagcgtgaacgtggcctgcttgttttcgttggacagggtcgacgtgaccgtggtcgtggccttggacgcgagcttgtcggcgaggccgcgggtggtgccgtcgcccagccacgggctcgtggtggacttgtcgagcttggcctggtcctgctgctgcgcccaggcgagcggatcgccggtgcccgtatacttcaggtagtcggcaatatccttcttgaggccgtcctcggtcttgagggtgacgctctggttcggggcggtgccgtacacgtcgtaggacgcgaccttcacgaccttgaacgtgtgtccagtcaattggtccgcgctcgtggcgttcaacgtgatggtcttctcaccgtccgtgacgacctgcgcgttcgcgctggacgccgcgacggcccccagtcccgcgacggtggcgatggcggccgccatcgccgtgatcttagtgaatttcatagggaactctccttctttcatgaaaaaccgttcggccggacggccggacgggccgcgcgccggcgcgcgtgcggcgcgcgaaatctgtcgctacgccctggagcgtttcgctccgaggacggccagcacgagcgccgcggcgatgacggacaggccgagcatcgtgttgttccgggcctcggacgcgcccgtcaacggcagcgcgctctgtgcgacccgcgtgttcgtgaacgccgccttcgcgatgccggtggcgtcggccgtgtttccctcgtcgtccttggtccttgcgatggagacatggacggtgagggcgccgctggatgcggtgccgccgatggccgtgatggtgatccggtatccggccttcgagcaggcaaggtcgccagggcagtccgtccggtccacggccgcgtcaaacgtgtacgtgccggccttggacacggtcgccgtggccaaggtgaagtccttggccacgccgtcccgcagaccgccgacggaccgtgttttggataccgtgatggtcttgtccctaacggcctgtctggtggcctggtcggatgggatgaacgtgaacctgaacgcctcgccgttcttcgaatcgcggccggtcagggttttggagccgttcacggtgaccgtggcgggtgtcgggctgttgacgaatccactggcgaacgtccagtcgggatgcgtgttgtcgagcgtgaacgggtggctactgtcatccttgtggaacccggacggggcttgggattcggtgagcgtgtatgcgcccatgtcgaggcctgtcaccctgaacgatccgtcggtccgatcctcgtcgccttcgccgttgtccgtgatggtcctggactggccgtccgggccggtcagagtccaggaggatccggccagcggattgttttcggtgtcggtcttgcgccatgagacggttcccttgcgggtcttgacgtcgaccagccgggtgtcgaacgtggcgcggccgcattggtctttgaccgtgaccttcacatggcatgggccttcgttcgggaacgtgatggaagtggccgatccggtcgggtcggagaacgacgcgttgcagtcggattgccactggtacgtgtatggcggcgtgcctttggtgacggtcacggaagcctgcacggtcgatccggccgtggcgtcggacgggatcgcggccttcacgtcgaggcttttctccactccggacaggatgaggaagttcaggaacgctcgtatggcgttgcggtcggcgtcggtgttttttttgaattcgtgtccggcctcgtacatgaccatgccgttgccgtagtcgccgtatccgggacccacggccatgaacacggccggaccgggagacataccggcgaggacttgccgctggttcgggtcggtctccagcaccctggtggtggcgcgccacgcgctgccgggggcgggcatgtagatctcttccgctccgttggcgtgcgcggcgaacgtgttcccgacgaactgcatgatcgggtccgacgcggcgcccgtcacccggtaggcgccgcttacacccgacgcttttttatgcttgtctccgatgagcaggccgttggtggacaggaagaacatggaaccgtcatccacgcccttgcccttggtattgctttcgagataggagacggcgtggcatccggcccagatgtagccgccgcccttgttgaaggaggcgagtgggctatgcgtcgctgtggtcggttcggcgtgcggcatgacgtagatgtcgtcgcaggaagagtccaggtccgccggagtcgctttttctttgtagacgcggtcatcgctggcattctcgttccgcaggatgccagccttgactaggtacttcttggctatatcgccgttttgcttgtcgagcacgacgcgggggaccgaggagatcttccggctgtcggcaaccgtgacggcggtgtcggtgggcccatcgatgcgcacgccgtagccgcgccacttgaacagcatcgacctgacgttgtacgccggatatgacgaacgggccggagatgtagttcctgccgttgtaggtgaggtccacgccggtctggctggtcttgctcccgttgatgacccagtacaccgggaccttggcgttgaggacgagatcgtagatgaggccgtatggtttgagctgggcgtcgtcagaaaaggtgtcgcccatgtcgacgatgtacgagccgacggggaacgtgatctcgcccgtcttgccggcggacttcaccgctgtctccgccgaggacgtgccggccggcatgtcctcaccgctcgcggtgccggccaccgacaacgcgagcaccatggcgagggcgaccatcacggccaggaggaacctatccccccccccggtggtttttccgttttggcgagttctagtgatcgttgcaacacctggcctaccgcagggaggatcaggtgaccgcgagccaccatgacgacgggacagggacccgccgctgggtgttccaggggcacggttatccgacgaggaaggcgatgtgcgaggccaggcgggccgagtacgtgcgcctgctggccgaggagggcgtgaacttcacccaggccgcccatgcggtcggggtgtcgaaacgcaccggcaaggcctggaggaacggacgcgcccgggccaccggcaggaacgagagaccatcggtggactggtatcgttccaccatggacaagcccaggaagatacacgcccgctatctgggccaggaggaacgcatcctgatcgccgaccggctgcgcctgggcgacggcatacgcgccatcgcccgcctccttgaccggaacccggccaccgtgagccgcgagatacgacgcaacacgaaccccctgaccggatgctacgagccgtaccacgcccagcaatcgagcgccgaccggctcaaacgccccaggcccaggaaagccgggccgggcacgcgcctgtggcgggagatactcgccggccttggacggcattggagtcccgagcagatcggcaaccggctcaggcatgacttccccgataatgaggacatgcacgcaagcgtcgagacgatctaccaggccatctacgtccagggcaagggcgagctgaaagccgagctgaaacgggccatgcgccagggccgcgcccaacgcaaaccccgtggcggcgcgggtcgcagaccccggttccgggatcccatggtcatgatctcggaccggcccgccgaggtcgaggaccgggccgtccccggccattgggagggtgatctgatcaccggttcggcgaacaggagcgccatcggcaccctggtcgaacgcgccaccaggttcacgatcctgctgcacctgcccgacgggcacgacgcaggccaggtccagcaggccatcgtccgcaagatgcggaacctgcccaggctcctgcgcaactcgctgacctgggaccagggttcggaactcgccctgcacaagcagatcggcgcgagcctggacatgcgggtctatttctgcgacccgcactccccgtggcagcgcggcaccaacgagaacaccaacggcctgttgcgccaatacttccccaagggcaccgacctatccaaataccccgaggactacctcgacgcggtcgccgaggaactcaacgaccggccacgcaagaccctcggctacatgaaaccaagcgagaaaatcctcgaactcctcgacaccgcaagctaacctagaaaaccaagacaacaacaccaaaaacaccaggtgttgcaaccaccactagaatccgccttttccgccattctcatcagtgcttccttccaaggacggaatcggatttcacgcccgaactatgacgccgcggatcagaatctcttgtgaacaacagcggtatgcacaacgccgcgagcacgtaggccgccaccacggacagagggaccggacgcgggtcgatgacctgtgactcgtccgggatctcgtccgggatcgcggcgcgcagtccggacacgagcagacggtgcgtgttcaccccgtacggcgtgcatgtcatcagggtgacacggtcctcgtcctcgacgatcctgagtttcgacacgtcggacggttcgatcacgctgacgcggtcgaccttgtagcccagggtctcgcccatcaccttgatgtagaaggaatcgcccttcttgagctcgtcgagcctggtgaacatcaatgccttgaccaagcccctgtgcccggtgatgaccgcgtgcgtgcccttgcctccgacgggtaggctgctgccgtacaggtggcctgccccgagctcgagcgtggattcggatgtgccgtggtagatgggcaggtcgaccccaatcttcgggatggtgaccgaccccatgacgccctcgccagcgtcaagcatggagaggtatctcttgtcggagacggaacccttcgtctgcgtgaacgggtcgttggcctcgccgaggacgtactgtccatgcgaggcgaggtcgcggttgtacgcgcgcgcctccttcaattcgttctccgcccgctgatacggccagtccgcgaccgtctcctccagacgaccggacgtggcggactgttccccggcggaccgcaactgcagcatgaccggcacggacaccaccaccagccccgacacgacgagcgcgacggacacgacggacagcagccttcccctgaacgacgcccggcggcgcacgtcgcaagccttccggacgtcctccaggcccaggacggctccccaaccacggacgatggtcttcgacgatgccggcatgcgcacctccctccggacggatcggcttggttccctcactgtggaaggcagaataacgcggaacgacgacgagggacgtcttccacccgacgcgccccccctctccgccgtacgaagccgggattcctttgccgcggacggcagccatgacatcaccccccccccgcccctttgccccttcctttccgacacgccgcgtttctgaaggacgccacccccatatcgtctcggcggtccgtcaggaacgacgggcggacggccgttcccatgaatcgtcgggcccgctcccacgcgcggaggcggttccgtgaccggggtccggccccggcctgtcttccgtcgtgttccgacactcctatacgttgccaaacgtttgggcatgctgcttcgggccggcgatgaagcgcatccatcggagcccgttcgccacgaaggacgtcggcgagcggtctcccgtcgccgccgaccggtacttgaaagacactggccggcacccggaagacacggaaatggcgatcccctgcgttcggagccatgaaatccttgaagtaacaatcgtatctcgaagattccggctcgcttcgactccctgattgttaatcgtccgatatctaatcagctcgtcttcacgagcttcaggaaccacggaacgcatcaacgcaccaaacggcatctgcaacgcagaaccaatcgtggatagcttggtaaaagacaagtccaacggagcatccgcatttagccattgaggaagctcggcaagaccatctctatgtgctacagccaccggagcgtggctggatgtacggtaatggacgccatcgccacactcccctctgatatcgcagatgaaaaaatccgccacatgtaagagcagcagtcacggcttcaggcgggtattggtaattttcatgatatccgaatgttggatttcaacacgagcaatgaatcgacggaaggaagcacctcccatcaggcccctactagggtcgaaagtcaatggcaagcaaaaagtccccggaaacgccgatttccaaggacttaaccgtgccccctgtgggattcgaacccacaacccacgacttaaaaggacgctgctctaaccgttgagctaaaggggcaacattaccaagatacacgcgaacaccggacaatgtccagtacggcgttgcgcgcaggcggcatcttgcgcgcgctgactgacgaccacccccagtcgctacgcgacagcccccgccagcggggggggcaaaagatggcacagtccctacgcggcagccctccgggccctgcaactacggatgtgctacgcacgaccattctgctgctcgcctgtcagctcgacttcgcctacaaacagctccgctgtttgcttaacggctcagcccgccagcggggggggcaagacagcagtcgccccgcgacgcgctgaatcagatcaggcctagggtgacgaaggcgttggcgataccgtcgtcgtggatgtcggtggtggtcatgtcgcagaaacactcgatgccatgagtggcgttgcccatcgccacggatgtgcccgcggccttgagcatcgcggtgtcgttgtcgctgtcgccaatcgcgattgtgtcggcgatgctgtagccgaggtccttcgccacatcgcacagggccgtgcccttgtcgacgccgttgatgagcaactcgccgttgttgggcgaaatatcatcgtacgagccgtgaaccagcgtgaaccactcccccaaatcacgcgatacgtcatcaaaactcacatcgggatccgctccggagaaatacgagcccttgctcgcatggatgacatgccccagcgtggaaccgtccggcaccgcgatgtcgtcgatcagataccagtaccgcgcgaactgaccgttcttccacacggccgaccccttggattcaagatgccgcgcatacccgcgcgagatgtacatgccgtccgcgccctgccactggtagttctcgatgccgtgccgttcgaaatacgcggttgcggcgtcgatcgcctcgggcgcgatgtcatgccggaacagtacccgcccgttgacgtccgcctgcgctccggccaccgagatcacgccgtcgaatccgagatcgagaatgccgcgttcgatcttcggcatcgagcgtccggtgcagatgaacagcttgtggccgcgcgaccgggccgccttgcatgcctcctgcgcggagatcggcacttcatgccgttcgtcggccaatgtgccatcgatatcgagaaacaccagtttgctggacattgccacccttcccgcgccttctccaggcgcttccggtgcaccagtgtaggacttcgggcggtcttgcactccgcccggcccggcacggcccggctcggcacagccccgcccgcgcacggcccacgacctacatgcgccctgccctggacgggtcgatggacatggtctggaatcggttcgccatgaaatcgttgccgaaatggtcggcgaagaactgcgtgatcggcgaatccagcgcatgccccgccatgcgcccgtaccagcagtcgaacgccatcaatgtcatcatgccgtcgatgaacagcagcacgaataccacggcggtcagcgaataccgtaccttccacggaatcaggttgatgaacttcagcaggtacggcagcacgaacttgatccaggcaagtcccataatcccccagaacaccatgtacttgccggaggtgcgaccgcctatcgacagccattcgcccgtgtaatcccaggccttgataccgaacgcgacctccatgaaccagctggagcagtactcgaacacgccgccgatcagagcactggagaagaagatcagcacccagttcgagcgccacagccggttgagcagaatcgtcatgaatccggcgccgaacccgtagatcggcgagaacggcccccacagcatgccagcgcgatcctgatattcgccgtagtaataccaatgatatatcgtctcgaccaccagtccgatcatgcagccgatgacgaaaatccagaacaggttgaagaaatccagcgagatatagcccttgccgctcatgtcgcggccgaccatgcccttggcgagcgccgcctcgtattcgtcgcgctcatccatgcgcttgagcgcgcgctgcagccgccgttcctccagcagagtcgggtcaagggttatggcgagcgcgaccagtatggtcatctggatggacggcacgagcagattcgcgcccaacccgtccaatgcgagcgacagcagtccctcggcgaacgtcaccatcatgacgatatacgaccaccaggcggaataccgccgtcggttgcggatcagcagcacgcccagcacggtcaggcatgccgcgttggcactggagaccaccgtctgggcgcatgtgaggatgaatgtcaggttcagcacgtcgacggtcacacggccgtcgagaatctcatgcaccgaatatcccgccatcagcacgatgacggggagagtgatgacgccctgcagcagcacgagcacgccgtagatgcgggcgatcagcggcagccgcctgtccgcggcatccttgccggagtggcttttcgcttcttgttcgacgtcggcgagtaccgcctggttggcgagtgcgtcgacgtccgcggcgagctcctgcccgtcgcgacgctgactggtcgtatcagaggccatgtatcagcgcttcgacgagcgtttgccggcgttcgcggcgttgacggcacgcagcagctgccaatcgcgtgtcatgtacatgccgaaggccacgccgaacgcgatcagccccaccatgtcagcggtgaacagtgagaagaccatcacgaagatcatccagctgaccgtccatttgaaccgcggaccgggctgcatgtgcttcacggccatatatatggtcaccgcggcgactcccgccgtcacgatggcgtacaggatgatgagcgccgtgttgctgctgttgcggctcagcgcggtcacggcctgagccgacgtccgggcggcctcggacgtactggaaatcacgccgaagtacgacagcgcgaagaagatggccatgccgaccgaatacacggcaccggcgcacatgatcacacgttccggcgttcgtttggagaatggcgagcgcgcattggctttttcacgctcgcgcagatagttgttctgcttggatgtcataacggcgatacctccgacgtcggtgtacgaatcatgttccatcgtaatacagtcagatggattacgctccttgccggaaagccgtgccgtgcgcgggctggggctgctacaccacgcccagccgctcgaaggcgtgcgcgaggccgctcgcgtccaccgcatcggcgacccaatcggcggcgtctttggcgcactgctccccgttgcccatcgcgatgccgatgccggccacctcgatcatggtcaggtcattgtcgctgtcgccgatcgccaccgtgtcggcgagcggcacgcccatggtggccgcagcgaaacgcagtccctcgcccttgctgccaggcaccaggtcgccgagcgtaacgccatcccgccgcgcctgctcgcgcgcggcgggattcgggtttacagctcctcgccgttggtggcgatgacgtgctggtaccagccgaaggacttcttgcggctgcgcttgtacgagccgtggccttcatcgtcgccgtccacgtagatcaggccgtagcgcttcttcatctcgccggtggtgaagctcaccacgtcgatgcagccccagaccgtgtagcccatgacgggcacgccgtccaggtcgatggccttcttgacctcggcgatgtggctcttgaggtattcgatgcgcgagtcgtcggcgatgtagccgttctcgtcgggcgtctcgtacatgcccacgccgttctcgacgatgaacagcggcttgttccagcgctcgtacatctcgcacagcgagtagcgcaggccgaccggatcgatctgccagccccagtcggtggccttgatgtacgggttgggcaccagcccgtcgaggccgtgctccatcgcgtcgagcgtggagccctgcgagctgacggctacggacatgtagtagctcagggagatgtagtcgacgatgccgtccttgatggcgtcgaggtcgcccggctccattgcgatgtcgatgccgtcacgctcccaccacttgagcaggtagcgcggatactcgccgtgcacgtacacgtcgccgaacaggtagcgcttgcgcatctgctcctgggcgagcatgacgtcgtccgggcggcaggtctccgggtagatcggcacgaaggagagcatgcagccgatctggaagtccgggttgatctcgcgtccgcgcttgaccgcgatggccgcggcgacgaactcgttgtgaatcgcctgccagaccttctgctccacctcgtgcggggtgtcgtccgggttggggatgatgccggagttcgtgtacgggaagatcggcgtgtgcatgttcatctggttgtcgacctcgttgaaggtcagccagtaggtcaccaggtccttgtagcgctccatcaccgtggtggcgaagcgcacgaagcagtcgacgaccttgcggttggtgaagccgcccatcttggccaggtgcaggggcatttcgaagtgggagagggtgacgaccggctccatgcccttggcgcggtagtcggagaacagctcttcgtagaacttgagtccggcctcgttcggctcctcttcgtcgccgttcggaaaaatgcgggaccaggagatggatgtgcggaagcacttgaagcccatttcccggaacagcgcatcgtcctcgcggaaggtgtgataatagtcgatgccgcggtggttcgggtagttgagcccgtcgatcacgctgtcggtgatcttgcgggccacgccagccgccccgccggtgagtacgtcgcagatgctcgggccgcggccgtccacgtcccatgcgccttcaagctgatgtgcggcgaccgcgccgccccagaggaaattctcgggaaatcccatgatgcttgttcctttacttgtgtttgccgtacgtgatatgcgcgtcgtgcgccgaaggccctcagccgttgagctttcgatacaggtcgatgagctcggtgaccatgagcttcacagtctcggtcgacatcatctggtcttcgacgtgggtgagcagcagcgacatcgtgaccgggtcgccggccgcctcctgctgcaccagcttcgcgtgctgttcgtggccggccgcgtactgctcgtcgccggacttcatcttcgcggcggcggtctcatagtcgccggccttgacggcctgcagcgcttccatgtaatcggatttcgcagagccggcatcgacgatcatctgcatgcacagcacttccatgtcaagggtttcgggtgcgtccgccattggactgtcctttcgtcggtgttcgccgcgccggtcaccggctcgcggcggacggtcattcgtggggttgggtgatggggaatgagggagggattgagggagggaatgcccagcgccgtcgtatcggacgacgccgggatagggagatcacttgccggcgagctcgatcgcgtggttgagcacgttctcgccgcgcaccaggccgtagtcctgcgggttgatggattcgaccgggatgttcgggaacaggcccttgacacggttcagttcgaagcgcacctgcggtccgagcaggatgacggccgcgtcgggcgccttctcctcgatctcggagatcgggtaggcgtcgatctgcacgtcgacaccgttcttgacggcggcttcgcgcatcttcttgacgagcatggaggtggacattccctggttgcagcaaaggacgatatgcatgatggtttcctttcgtggggtgcggccttgcggccgcgctgttgacttgttggcttgttgagggggttgggttgaagttgtgtcgtgcggaccggtcgccggccgcagtggccggccggcggcctgacggttactcggccgcggcgtcctgctcctgcttgaggcagatcttgtcctgcatcttgacgaacgggaaccagatggcgatggaggccgcgaagatcagcacctggatcaccacaccctgccatccgccgagcaggaagccggagatgatcggcggcgtggtccacggcacctgcatggcgccgaaggcgggcaggaagccgatgaccatggcaccgtaggtgaggatcacggcgaccagcggggcgcaaatgaacgggatgagcatgatcgggttgtagacgatcggcaggccgaagatcatgggctcgttcacgttgaagatgccggggacaagcgacagcttggacagctcgcgcacctgggcggacttggcgaccagcagcgccgcgacgatgaagccgagggtcaggccgacgccgccgaacttgcagaagcagtcgatgagctgcggcaccagatagtggccgccgttggcctgcgtggccttgatgccctggtccatgaggttctggttgaccagcgagttggcggtgagcaccgggtagatgatgccggagacgatgttcggaccgtgcagaccgcaccagaacagcagcgacatgagcagcacgatgatgatggcaccggcccagttgtcggtcaggccctgcatcggggtctggatgatcttgaagatgagctcggtcagcgaaacgccgccgaagacctggcacacctggtagatgatcgcggagtagcacatgatgaagaagccggggatcatcgcggagaaggcgttcgatacgccttcgggcacggcgtcgggcatcttgatgcgcaggttcttcttgatgcaggtggtgtagacccacgagccgatcaggcccatgatgatggcggagatgatgccgttgccgcccatccacgtgttcggcaggacgttggagatggtggcggtgtcgccgcccagcgccttgatggtgtcgctggtgaccgtcagcgtggagggcgagacgatgaggaacgagaccagcgtcaggatgccgcaggagatgccgtccatcttctcgttgcgggcgtaggagtagccgatgccgacggcgatgaccatcgcgagcacgttgaacgtggagttgttgatctggttgagacccagattccaatcgctgccgaagatccgggccatgaaatcggtgtagccggtgatcggcaggtttgcgatcagcaggaagatcgagccgacgagcgtgatcggcatggacagcacgaagccgtccttgagcgcggtgatggctttggtgctcgcgaatttcacgaacacgtcaagcgtcttctgcgcgacgttggtgaacctttccttcatcacaggagtccttccttggacatctgcggacttcgtagtccgcatcttctgttgtacttccagcacggcttttcagccttcagttattcgatatactttttgttgttcgaataacttgtgcttttagtatacggattatgggaatcctgtcaaatatggtcacatcgctgttattacaccgattatcggcataattcagccattgtcagcgctcactggtcaagattgcgacacgccggtggtcaaaatttattcgaataaattaatcgtttttacttcgacggctcacatcaggccgagccgttcgaaagcgcgggcgagcccgtcctcctccacatcgccggcgacgatgccggccatcgccttgatgccctccgacccgttgcccatcgccacgccgaccgcgcagtactccagcatcgggatgtcgacggccgcgtcgccgaacgcgacggtgtcctgccgattcgcgccgagatgcgcgagcagccggtcaatcgcatgggccttggtgacgcccttgactccgagatcgccgaacagcgccgtcgctcccctaccgccccacgtgcccgattcgaggtcggggaaacgcccgcgggtgtcgaggaagtcctggtacgagccgagcacgtagctgatcttgttcacgtcgtcccggtacagttcaccgtcgaagatcatgtcggggaacgcctcgcgcacggtcaggcgattgacgttctccttgcccttgcgggcggaatactcgcggatggcgtcgagcgcgccctccccgaagccctcgctggcgaacaggccgttgttgctttccagatagaattcaaggccgcgcggatggccctcacggccgagtccggcaggttgttgtcgtagtcgaccagtgtgccatccacgtcaaacaggatgatcttggacatcgtcgtccgcctttcgtcgatggtcgtggcggccatgcggccttacgagcggagccggctgccgcgcgtcagcgcatcgaggtcatcgtgaagaacctcgcgttgacgtaatggtatgcgatgaacgaggagttgaacagacggccgttggtcaggaacgagtcatcctccaggtacagcgcgggatcaccctcgttcagaccaagcacccgggccgcgtccgcctccagcttgcccgcgtacagcaccttgtcgacgaagccgaaattcagaccgaggtcgttgcgcgcgtacccgaacagcgacccctcggcgatctgctcattgatgaacggcacgaattccttgagataccacgccgtctcatatgccagcggattgccgtcgacctgccgcagacgcacgacacgccacacctgatcaccctcggcgcagtgcatgcgcttggccagcacggagtcggcctgcagcagcgacaactcctgcaccacggacgtcaccttgcgatgcgggtactccgcggaaatgccgcgcgtggtgccgatcgacaggtaatcgccctcacggtcctcgcgcacgaacacgccgctgccccgcaccgggaacacgtcgccggcctcggcgagcaccgcgatggcattgcgcacgcggtacctcgtggtctggtactcctctatcagctggtcctcggtgggcagcttcccggtctgccggaactcaccggcatcgatacggcctctgagagtcgtggccaattcgcggtaatcctgagccatcattcctcctaccgtctgattccgcccgatgcagcggcccccatcaccgccagagacaccgcatcccatgacatcatgattttatcgcacaacacacggttattcgaataacaacatgtacaatcgtacatgataatcgtaatatcgtgcgcctcggcaccctttatacgacaatggcgcttgggcgacatgccatgccacccaagcgccatacgaaccgacatgcgattattgaatcgaggcctcctgccgcgcgacctccaacgccttgttgaaggcgtccgacgtccagctggctccggccaccttgtcgaccttcaggtccttgagcggcttgccatcgaccacgccattgattgcctcggcgaagtcattctggtggttcttggagatcgtcgtgaacggatgccccacgatctcgaccttctcgaccttctggtcggcgatggtcaggtgcacgtcgatggaatcctctccgaccggcccgtactggccgttgatcgaataggtgccgtccttgtagttgccggtgtccttcttgtcggaggtcgtggacttgcgcttggaggagctgtcggagccgctcgatgactgggactcgctctcctgcgacttctcggtctcgccggaattgccggcatactcgtcgttcatcggcgcggccttgggctcgccgcaaccggccagcaacgtggtcgccgcgatcagtcccgcggccgccaccatcacgctcttcagcgtgcgggatttcgacggggaaccgccgtccgcaagcccgtcatgctgcagagcgctgccgtcactcatggtcaccacctgtcttcgccgccttggtaggatcaatgaaatcaatggaagaatcgccatgctgcgcaccttcggcgtcagaaccggtggacgcaggcttgccaccggccgctacgtacgcatcatgtgcatttttatcattccacttctcgcccacgagcacgccgtggttgagcatgatttcacgctgggcgcaactcgccacgagagcgtcatgggtgaccacgatgaccgtggtgccctggtcatgcagctggcggaacaggtcgaggacgatcttctcgttcttctcgtccaggttgccggtgggctcatcggcgagaatcagcttcgggttgttgatcagcgcacgcgcgacgcacacgcgctgctgctcgccgccggacagctggctcggcagatggtgagcgcggtccttcagaccgaccttcttcaacgcctcaagggcctgcttctcgtcgacgaccgaatggtagtactgcgcgaccatcacgttctcgacggccgtcaggtgcggcaccagatagaacttctggaacaccaggccgatcaggttcttgcgcacgtcggcgagctggccggcgttcagatcctccagcttgcggccctccagcgaaacggagcccttgctcggcgtgtccatgcagccgatcatgttcatcagcgtcgtcttgccggaacccgacgagccgacgatggccagccattcgccctgcggaacggtcaggctcagatcatcgaccgcatgcaggtcgccgtagatcttggaaatatgatcgagttcaagcagcatatccatgattattccttaactattccaactattcctcgcgcagcacgaccgcggggtcgatgcgcgtggcgcgatgcaccggggggatggatgcgacaacggcgaccagcgcgctgaacaccaccgacacgacggcgagccaccagttgaaaccgatggaacgctcaaacacggtggcgcacagccagcgagccatgccatagcctgtcgccgtgccaagcaggccgccgagcaggccatacaccgccgattccacatagaactcgacgccgatggcatgcgagctcgcgccgagcgccttgcgcagaccgatctcgttgcgccgctgcgagacgatggagctgatcgtggtgccgacgccgaccagcgtgaacaccagcacaaccagcgacacgatccagaacagcgtctgcagcatcgtgatgacgcgcgtgtcggaagcggtgatcttggtgacctgctgcgccttgacatgcatcgacgtcatatcgttgatgctgttgaccagcgcggtgaggtccgaggcgcccgacgagtattcgatgacgtccacgccgcgcgtggagccggtgagcttgtccacgtcgccggccagcgcgtagatgatcgaatcctcgctgccgccggtgtcaacgatgccggccacacggaactcggtaccggacgtgtccatgatgtcgctggagacgtggccgttctgggtctgctgggcgccggtggagccggacgaggtctggccgtctgacgtgccaccagtgccggactgtgccgtgccatcggtgccgtcagtaccgggctggctcgcctgtcccgaggacgcggcgttgtctgatgcgcggtagccgatggtgatgctgccgccgaccttcaagcccatcgcatcggcgacgtcccggccgaccagcaccttgcccgcggacggccaggagccgtcgacgacccaatgatggttgaggttcctgacctgcgcggggttgacgccggccatcacgtacggggccgcgttgacgcgcacgttctcgtaacggtacgtggcgtgcttttccgagcccttggcgctcaccatctccgtggtgtgctcgaccatcgcgtcatcgatgccggacttgccgttctccgaatcggcgagcggcgtcacgatcaggttggcgccataggctcgcatctcctgattcatctgctgcggcacggcgatgcagatcatcgccagacaggacagcgtagcggcgccgaccagcgacgccaccacggccatgaccgcgcgagaccgcctgcggaacaccgcactcaacagcatcctgaagaacataccggtattggtcatctcagcacgcctccttcatcatcgtcttacgatcagcgtccatgcagcacctccgccggcttgaggctcagaattgagcgaatcgacgacgccgatgccagcagcacggtcagcgccagcagcacgaacaccagcacgaacaccatcgggcgcatggtgatgcccgaaccgaacaccacctgcccgatgatctgcgccacgcccgagcccaaagcggcgccgacgatggctcccagaagcgagatcgccgcggtctccgccatcatcaggcgcgacaccgcgccatcggtcgcaccgatcgccttgagcagggccagttcgctcgaccgctcgccgatcgaggcgaccatcaggttggccactgccacggccgcggcgagcaggctcagcaccgtcatcaggatcatcacggcctgggtcttctgcagcacgttgccctgcagcgcggcgacctgccgcacctgcttggcgaccgcgccgggaatgacctcctcgatctgataggcgattgagctggggtatgccgtgcaataccaggtctcccactcgtcttggctgagcgcggcggggttctgggccgccttgcgcgccagatcgttctccggcgttgtcagcgccttcacctcgatcttgtcgacggagtccggcaggtccgacagcacctgtgccaccgacgaggagatgtagatggcactgttgtcgtcgtcgccggaatcgtagacgccggtgatgcgaatcttctgctcgtgcgtgttcccggccgccgtggtcttgcgcaaggtgaccgtatcgccgcgtcccacgccgagctgctgcgcgagcgtcgtgccgatcacgccctgatcggtgtcatccttcggccagctgccgtcgagcttccaccatgagcgcatgccgtcgacgcccacgacggtggtctcgcccgacgcgagcttcagcgtcttgttgaaccacgtgccgactaccgccgccgccgtgccgttcacctgcgcgtggacgttgagttgcggcgcgaaattcgtgatgttgaacgcccaaaaaatcgtcttgatcttcgccgcgtcggactccttcaggaacgaggtcgggtccgcgccggactgcgggccgccctccatgttgtacaggtcggacaccaccgcatcggacttcggctgcacggtgatgttcgagccatatgtgctcagctcggcgttgagcttgtcgcccacgtcgaacacgacgcccagcatcgacaccgacaccgtggccgacaggcacacggtcagcgcgatcagcaggcgcctgcgtaactggcgggtgaacgagcgcctgatcattctcagaaagaacatggtctaaaccccttcctgccttactggaagtgggcgctcagcgcgtccaggtcggcggtctgaatggtgatcttgccgctaccggtcttgtacgggaacgggatcgggttgcacccgcccttgaagccgatggtcgccaggttgatggccacctcacacttcttgcagatgatcttgccgtccttctcgtagtatccggcgtcgccgcagttctcgcaggcgtcgaggccgatgccgtacgcgccgccgttcttcttgatgatgatgaagcgcatcacggtgccgtccttggccttgtattcgaagcggtgcaaatggccgtcctcgacctggctgaacgggatcgtggccacgccgtccttgagcgaatacgcttccggcggcgagagagtcggctgctggttgattgcggccacgcccaaggtcagcgtcgcggtaacgccgatcatcgccaccacgctccatgcggcggcggcgatcgcacggcgccggaacgccttgtgcttgcgcaccgtggccgcattgacgtcggccgcgagtcgcttcgcagaaaccggcatacgcaagccggccaccaccgaggcgacggcgggaatcaggaatatgaacgcttgggccataatcaaaccggacttgttgttgatcagccaggcgagcatcacgaacgcgatgtgcgggaaccgcagcgtgcgggcctgcatgatctgcagcaggccggtcagatgctgcatcagctggatcaccagcaccaccagcaccgcggacaggaacgccggacggaccgccgtcgaacgcatcgtgcggaagatcgcggcgatgaccgcggacgcgatgatgcccagcacaaagccgagcgcacgcagcagcatatcggacgtgaagatcgggtctcccggctcgacccagatggtcagctgcaggatcacgtccggcagcgcatagaacacggtgagcgcgatgcccaacgccgccaccagattggcgagatgcatcaccgcggcgtgccgacgccaattgcgggtgatcagtcggttcacgaacaccaacacgatcagcaggaggtcgatgaccacgcagcaccacagcaccgggtagttgatgaatgtacgctggttaatcaccgcggatgcacgcagtccggcgaacacgatcgccgccaccaatccgatgaggattccccacagacgccatcgggagctgatcggcttgtcacgcccctcgccgacggtcagcatcacactcatgcacatgaccagcaacgcgggccccagcgtgcccggcatcaccgctacgaactgttcgagcattcgcaccctttccttgttccgtctattatgttccgttcattccgtcataaaaacagcgaaagctcctctcgggcagagaggagcatttcactcaggcaatgtcaatcaccactgacgcggggtgtattcccagttgtcgaaggtgacctcgatcggctcggtccagaagcgacccttgacgccggtctcgggatcgacgtgcagcatccagcccttcttggccggggattcgatcgacagcttcagctggtaggtgccggccttgtcgagcttgacgttggcgccgtagtgcgggccgtcggaggcgttcatctgcatgaaggtaccggaggtggccttgccgccttcgacttccttgccggtggacttgtcgatgatcgtgtagttcacggtcagctcggggacgaagtcgcccttgccgtagcccagctcggtacccttctggttggcgtggatgtcggcttcgaggtggaagctcgaatcagcggccttcaggcccatggaggcgggctccatgtcaatcggctggaagtacacggcgccgacggtcagcgggccggcgtccttgtcctgctcctcggcggtgccggacgggccgaccgggacctcttcaaagcctgcgccggagctggagttgtccttcttgtcgctggactgagaggagctgcccgaagacttgttgtcggaagcattgttggtggaaccgcacgcggacagcgagaaggccatggaaccggccagcagcacgccgagcagggcggcgatcttcttgttcttcatcatttctctatttcctttgttgtgtagtgaatggtattcacagattgttgggttgattgttcggggcaccggccgtcacggcagccttggccttcgccttgcgctgcttgatgaagccgaccacgaacagggcgatcaccgcgatggccgcaatcacctgggcgatgatgcattcgacgtacgggtagaagccgatccagtcgttcgtcggaacgccttgcagatacgttgccgggagtgcgtcgccctcgatcagcgagtgcacgccgccgccggcgaacacgaccaccagcaccgacatcaggatcgacgtgaccaggaagaacggtccgatcggaatcttcaccgacgtgaagcgaatcacgaagaagatgaccagcagcaccactgcggctgcgacggcaccaatcaccatgccatgcgtatcgcggctcatcgtgtaaatcgactggtagaagatcaccgtctcggcgccttcacggaacacggcgaggaagctcagcatggcgagcgagatcaccgtacgggacgcgactttttcgccggcatcgacctgtgaggagacggaggccaccgcggcttcggtcttctccttgatgtaccggttccatgcctcgacgctggacttgttgagcatccaattgctggtccatagcagcatggccatggcaatcagggcgcacacgccttccatgatctcctgaatcgggccggacccgccgaacgcgagcacgaagatgaccgcgaccacgcctgcgccggcaagaccggcgagcacgcccacatagatccacttggtgaaacgcttgttgccggacttgacaaggtacgccaccacggccgcgaccaccagcagcgcctcaagaccctcacgaatcagaatcaggaacgcctggccgaccgagctggtgatgaacttggtgaagctgccttccttgtcggcggcaccgccgtcgagcttgccggcgtcctcgaccagcatggccttcaaatcgtcgacgagcttcttggtgtctttgaacgaggcgcctgtgttcatcgacttgcggcacatcttgaactggtactcgacctgcgagacgcggtcgccgctgatggcgttcatcacgttcttctcgaagccgagcttctcgtagtactggtagtaggcgtcgttgacgagggtagcgcccttcgcgccgtcgccgcccgcgtacgacttgtaggccttgtcgaggatcggcatcatctcgttggccacgtcggtccagctgcggtcgcccttgccggggttcttcttctgcttggactgcagaaccttgcgctccttggcgatctgctcctgcagcgccttgtcgtagccgcggggattggcgagcttggtgttcgcgtcgagctgcttggcggtgctgtcgaggtcggagacgagcgcggtcacgctctgttcgatcttcgcctcgttgcccgtcacatatgacaagtcctgaatgtcttggaacgcctgctgctgggaggcctgcttgtcggagccgatgttgtcggtcacgacctgggtgaagttggacgccacatagatctcgttgtatgcggccatgaagtcggacgtggaaccggcggtgttgccgtccttgtattccttctgcccctgctgcagctgcttgtccatcgcggcggcgacgtcggcccatgtgtcgtaatccgcggaaccgtcggcggccatcgcctgcggggcgaacatgacggccatcaccgtgaacagcgccgcgacgacggccagcgaacgacatccaaccgcccgaagatgcgctaccgcacgacatcgcatattggattcctctccatatcaacgctttctaaaccatctatgcaatatagagaaaaaaaacctgaaagaacagtcttgacttttgaatttttatgcggtaatagagcggcccctgaggccgaaatgtctcatattgtggtcattgtatgggtggcccattaggggccgctctcaaaactcacagatacaagacgtttttcgggtttttccccttgtatctgcgagttttgagagcctgcttcagccatcaagacgattcaacatcttccgctcgttgtagaacgcgaagacgatgcctccgatgccgcacagcacggccgcgcacaccgcggcgatgcggtagcccgcgcccgaggccacgccgatcgtggagacgccggtgaacagcagcatcgccaccgactggcccatcttcatcgcgaacgccagccgtctgacccatcatcatgtggtgctgagcgacggcagcgtgcaacggctggacaccgcatcctccagcgggaacccctaccgtcccacctcatccggaggcctcaaaatctccggcatcaacgtaggctaaggcggctgcccccgctggcgaaatgctacgctgaggggcatgagcggattgcatgggcggatgccgtatacgactgcgtttgaacgcgcgatgggcaccggaatgatcattcagtcggcgacggccctcgacgacggcttccgctcgaaactcgacgcgttcatcgacgggtacgagtccgtgctgtcacggttccgcgccgattcgctggtgaccgcaatgggcgaatcctcgcatggcggctcgtttgattttcccgattgggcctccgggctgttcgatctggccgatgcgttctgcaccgcgaccgacggggcgcttgacccgtgtgtgggcgaggatctgatccggcttggctatgacgcacggtattcgatgacaatggaacccgatgtggagcatcatctcggtgccgtccacgggcgcccgacatggcgcaacgatgtggagcgtcatggcacaacgctggtgacgcagcgcgcggttcacttggatttcggggctttcggcaagggatattgcgccgatctgatcggcgcgatattggacgggcacgcgggcgatgaaaccgtccggcaatccgccaccggccccggctctcacgcgccctacatcatcgacgcgggcggcgatctgctgatccgcacgggcgagtctgctcaaccggccccactcgccgaggggtcaggacacgacaccggcgacaccgtcaccatcgccctggaggatcccgctaaccccggaaccgaggcgatcggcatcgcaagcatcgttgacggggcgttctgcgcgagcgcccccagccgacgccattggagtgaggaggcaggccgtcagctgcatcatctgctcaacgcggtcgacggccgtcccgtgcgcgatgtcgccgcgagttgggtctacgtgccatcggcggctggccgaccctaccccaccgcgctggcggatggactcgccaccgcatgcttcgtcaccgcaccggacgaactcgcccgcgcattcgacttcgaatgcgccgcggtgcacgccgaccgcacggccatcatgagccgtcacttccccggcaacttcttcaccgtataaacaatgcgggagggagcacctgcgtcatgccaccgccaggttttcttgtgcctattcgccacgctcgcacatcagtggcgccgacacgtcaatcgccgcgccgagcggtgcagcaagcaccttatggatgtccggagcgatatacaggttgccccttccggccggatacgcacggagtatacccacggacaccagacgagacagcgcgtgctgtacggccgacgggctcttgccgaaccttctcttcaacatactcgccgtgacggtgggctgcccgatgaggtacatcgccgtctgcacggacaggccgctgtatctgtgctcatccaatagactgcgatacctctgccgcacattgacaagacgcttcacgcgcagcagcgcgtcctcgcaggattcctcgatgtcttggcagaagaacagtatccagttatcccaatcccctttcgtggaaacaccgagcaagctgtcctgatattcgggtcgacggcgctcgaaccacggggatacggacagcagcggctggctcagcaggcctcggctcatcatctgcaacagcaccagcaaccgcccgattcgccccggaggcatgggcgcgaaacgcgcatcctcgatgcgccgcgtgggtgggccgatgaacacttgggtggatcgtatatcccaggcctgtggattgtcggacttcgtgcccttcacaagaagcttctgcaattcgcgcacgagagtgcaggcttatgggatgcccggactgaatctggcctatgccgcattccgccgcatcgaggtagttcagcacctcgcgcatggactcgctcagtccgcttttgtcctcgcccacctcataatcctgagcgagaacggtttcgagcggctcgaacgtgccttccagggcgctggtgctctgcgcttcgcgacgcatggtcgggcgacgcagcatatcggggttaggcaggtccccccagctcgccgggcgcatctggcgcgaacatttctttctccataacactagctgtacatttttttaaatcattcatactaagatttgcgaaatcttagtatggacaatgattaatcatgcgctttaccgcacctcatcacaccgcatatgcaaaagcgacgccgtacacgagccggcaaaacagccgaatctcgtatggcgtcgctctcgtttgaggcagtggaatcacattatggtcttataggcgtgactccctcagatgttccactcggacgggttgtagaagtcgccgttgagggccttggcggccttctcctgcgcttcctcaagcgtgacgccggcgagttcggcacgcacgtcgtcgagcgcgaccggggtcatcgacagggagttgacgccgatgccggtgagcacgacggccagatccggatcggcggcggcctcgccgcacacacccaccggcatgccgttcgcgttgcccgcgtcggcgatcagcttgatcgcgcgcaacaccgccgggtgccatgcggtctggtagttggcgaccgagccgagcgtacggtcggcggccagcgtgtactgggtcaggtcgttcgtgccgatcgacacgaagtcggcgaccttggccacctgatcggccatgagggcgatggacggcacctcggccatcacaccgaccttcttcagaccgaaggacttgccgagcttgacgaagtaggcggcctcatgcgcgtcggcgaccatcggcgccatgacccacaggtcggcgtcggtctgggcatcggcggcggcaagcgccttgagctgcccctcaagcacgttcatgtgggtgcgcagcgtgcgcaggccacgcaggccaagcgcggggttcggctcgtcttcgggggtgaggaacggcagcggcttgtccgcgccggcgtccagcatgcggatgacgaccttcttgccggggaactgggcgagcagttcggcgtacgccttggtctgctcctcaacactcggcggttcggcgttgccgatgaacaggaactcggaacggaacaggccgacgccttccgcaccgtactccagcgcggtcttgccgtcggagggcttgccgacgttggcgagcagcgggatgtggtaaccgtccttggtggcgcccggcttgccgcgcagctccttggccttcgcggccttggccttcgcggcttcggcggcggcgacctgctcgtcgctcggctcggtggtgatggtgctttccgcagcgttgacgataaccgtctcgccgttcttcaggtcgtcggcgccggcggcggacacgacggccacgatgccgcgggcacgggccagaatggccgtgtgcgaggtcgggccgccctgcgaggtgacgatggcgagggtcttgtccaggtcgaggccggcggtgtcggccggggacaggtcttccgcgaccagaacgaacggggtgtcggagaccgggacgcccggcgcgggaacgcccatcaggtcggcgatgacgcgctggccgacgtcgtgcagatccgccgcacgctcgccctgatagccgccgatggccttgaacatctcttccacggcgccgaagccttccagcacggcgcgctcagcggtcttgccctgctcgatgagcgtgttgatgctctgcgcgagcgccgggtcggaggcgaacatggcgatggcctgcaggatcggagcggcctgcttggcgccttcgtcgccgttcgcggcctcttcggcacggcggttcagatccgcgttgaccagcgccagagacttggtcacacgctcgatctcggattcggccgagacactgtcggcgcgaggcgcatcggacggttcgggaagcgcagctgccatacgaatgaccgggccgaccgcaacgccgcgtccgatgccaacacccttgataaccatatgttctccttatgttatggcctctcgccgcgaatgaccggtacttcccatccgcggaccgccttgttgacccaccaacttcatcgccggtaaatcattttctgtccacgccagtatacaccctcaaaagcgcgacacgactagaagtaaacgttttccagaaaattggaaaatcatggtacactgctgtgtcagcagccaaaagaacggccgcccagcaattggcatagagtaatgttattgctaatcggtatcggcgcgggccaacacggcacacgcacgctgacgagtgtcgatatcgacgcacgacaaaccgcaccggaaccaccggcgcgacgacgcaaaggagtgtctccatggttacccgcactaccaccatcaccgatcccgtcggcattcacgcccgtccggccgccaagttcgctcaggccgcgaccgcgtccggctgcaccgtgaccatcgccaagcagggcggcaaccccgttcccgccggctccatcctgtccatcatgggcctgggcatcaagcagggcgacaccgtcgaggtcaccgtggacggcgacaacgccgagaccgtcatcgacagcctcatcgagacgctcaccgcggccgagtaacctgcgcacgcattcgacggccgcccgcacgaaccgcgtgggcggccgtcagcgtattcccatccaccagatgcgcaccgacgcgcatcgcaagcatatggcggccgcccgccgtcataccgaacactgcgagccccatgaagagacagccatccgccgtaatggacgccataccggcatccaagccagacacgacgcccgtcaacgacgacccggcgcccggcccggaacaacgcccacagccggcgaccagttccatcaccaacgtggccgccatggcccacgtctccatcgccacggtctcccgtgtgctctccggcaaacgcaccaaggacgacgacatcgcacggcgggtccgggccgccgccgaggaactcaactattcggtcaactatgcggcgagttcgctgcgcggcgccgccaccaacaccatcggactggtcatcccttcggcgaccgaccatttcagcgccggactgcttgatgagctggaaccggtcatcgacatggaaagacagcaactgctgctcggcatcggcaacgagcagcatacgcaggacgaacgcatcgaatcgctggtggcccgcaaggtcgacggcatcatcatcgttcctgccgcgggcgtcgatctggcccacacgcttgaccgcaccaccatgacgacgcccatcgtacaggtcggcggacggcagcgatccttccgcacgtccatggtcggcatcgacgagaatgcggcgatggaaagcatcgtcgcgcacctcgccgagcagggcgtgcgttccgccgcctatctggccggcaaggaggtatcgttcgaatcggccgagatgttcgcgatgttccatacgcagatgcgcacgcaccggctcgtcaccgacacctcatggaaccgattcggcgattcgaccgtggagcgcggttatcagtgcgtgtggcgcatgttcgccgactccgatgcgcgaccgcccgaagcggtgatatgcgccgatgacatgatcgcgctgggcgcgatgatcgccttgcagacgctgggcatccgcgtgcccgacgacgtgcgcgtggtcggctacgacgactccccgcttgccttgacgacgatgccgacgctgacctcggtccgcccgccgttcctccagatcgtcaccgaggcgctgcgcctgatcgggcaggggcccgatcaggcggcgcacatctcgctgctgccccaattgattgtccggggctccaccgtcgtgcgttcctgaccaggtgccgtcatagcctccccggaatcagcgcgcagaacagcgcctcgaacaccagcatcgggttgccgttgcctagcaaccgcttcctggccacggtgatggcctccaaccgatcgactacttcctgacggctcagccgtgccgacagctcggcgatggccgtgcggttctccatgttgatcagcccgactgcgtcctcggcgttgttctgcagcaccgctatgtcgcggtagatgctggcggccgagttgagcgcgcggtcaagcacgtcgcggctccggcgcgtggcccgccgcttgatctcgtccttcttggcgatggcgttgtaggcgccgcgcagcttcggcgggatgcggtcctgctcgccgaggccgttgatgcggcggaaatccgcttcggcggcggccgtctgccggttcacgtcggcttccgcctggcttttggcggtgtcgatgagatcatcggccagcagcaccgcatccgatgccttgcgcagtcccagcagcccgacgatgagctcgtcccggtccgacatgacctgcgtgtcggaggcgtacagtttcgctatgccgatatgcccttcggcgagccgcgccgcgcgcaccgccacatgacggtcgaattggcgttccgccggcagcgccggattgacggatgccatcaggtaatccgcgaccgctttcgtggacggcacggcaaggttgacgatgcgggtacgcgagcggatggtcggcagcacatcctgcgcgctgggggcgcacagcagccatatggtgtgcgggctgggctcctcgatctccttgagcagcacgttcgtggtgcgttccagcatgcggtcaacgtcttcgatgatgatgatccgccacggcgccgtgctgggcatctgttcggaggtgaggatcagctggcgcacgtcatcgatgccgatggtgaccttgttggtggccaacgtggtcacgtcgggatgggtgccggacagcacctgacgggttatattggtcggctcgtcggaaaggcccctgtcagggctttccagcgcggccgcgaacgcgcgcgcaacattcgagcgtccggaaccgggcggtccgcagatcagccacgactgggccagcgccttcgggtcgccggagacgatggcctgcagttggccgaccactgcctgctggccgacaatggagtcccatacgctcatcgcgcacctccagccggagtgttaccgtcgctttccttagtgacggcagcctgagcggcagccgcctgcgccgcggcccgctcatccgccgcggcatcggccagcaccgcgtcaacgtccgccttgatgtgctcccatacggcctcgatcggccatgcggcgtcaatcacgcggaaacggcccggctcgtggcctgccagatcgaggaacgcctgcctggtgcgctgctggaattcgtcgcccgcggactccatgcgatccgcgtcatgctgcagacgccggtgcgccgccgtcgggtccatgtcgagcaggtacgtgcgcacgggcatcagcccgccggtcgcccacatgctcagcccgcggacgtcgtcagcggtcagttcacggcctcccgcctgataggcgagcgacgaatcaagataccggtcggtgatcaccacggctccgcgttccagcgccggacggaccacttcagccacgtgctgcgcccggtcggcggcgaagatcagcgcctccgcgcgcggtgcgatatcggcgccgtcggcttccgcggcgtctcccggctcacgcagcagcagctgacgcaagctgccgcccaatgccgtgccgcccggctcacgcgtcaccacgacctcgcggcctgcagcctccaagtagtcacgcaggcgctcgacctgcgtggtcttccctacgccgtcaacgccttcgaaagaaatgaacaatccagtcatatctacccccttgcccacagtgtacgcgatggcggcatgcgacgcggccaggccgccatcgcggcggctgcgacgtgactctactcggcggtcttcttcgcggcggtcttcctggccgtggtcttcttggcggccgtctttttcgcggtggccgtcttcttggtggcagatgccgtggagctcttcttcgcggcggtcttcttcgcggcggcgcccgtcgtcttgcgacgcccgcgcttggacgggccggcggcacgcttctcggccagcaggtggaacgcctcggccggctcgatggactcggccgtgtactgcttgggcacggtccggttcgtttcgccgtcggtgatgtaggcgccgtagaagccatccttgatggtcacgttcttgccggtttcgggatcggggccgagctcgcgcagcggcggcttcgcggtgccgcgtccacggccgcgtccgtatttcggctgggcgaacagttccttcgccttgtcgacgtccacggtgaagatctcatcctccgaggcgagagaccgcgtctcggacttgccgtcggctccggtcttggtcaggtaggggccgtaccggccgttgttcgcctcgaccgtgacctcgccaagttcgccggtctcggtgttggcctcctcgtaaacgcccacggtgcgcggcagcgacaacagtttcagcgcatcgtccagcgtgatcgattcggggctcatcgtcttgaacagggacgccatcttgggcttgggcacagtggtcttcttggacttcgtctcggatgacccgccgtccgtctcaagcggcaccaaggccacatacgggccgaaccggccgttgcgcacttcgaccgtgccgccgcttgccgggtcgacgcccagctcgcgcgggccaccggcattgctgtcgatgagctcatggccgacctgcacggtcagctcgtcgggcgccatggtgtcgggcagggaggcccgcttggggttgcccgccgcatccacgtggttcatgtcttcgagatacgggccgtaccgaccgacgcgcacgtgcagtccgtcgccgatgtcgatggtgttgatggcgcgggcgtcgatctcccccagctgcgcgacctgctgctgcaggcccgcgtgcgcttcgtccgccgaagtcgccgcgtcgccgccggaaccgaaatagaaatgggtcagccagtcacggccggtctcctgaccgtgcgcgatctggtcgagcccgttctccatatccgcggtgaactggtaatcgacgtacttggggaatttcgtctccagcagcttgatgaccgagaacgccagccacgatggaatcagggcgcgaccgcgctcgtagacgtatccacggtcgatgatggtggagatgatgctcgcataggttgaaggacggccgatttccttggcctccagcgtcttcaccagcgacgcttcggtgtatcgcgccggcggctgggtctcgtgcccgtcagcctccaccgaggacgcggcgagacggtcaccggtctgcatcggcggcagcgatccgttgtcgtcggtttcgcgcgaggcgcgtttcgccgcggcctcgccgtcaccggcacccatcgaggaggcagcgggggccgccgcacgacggccctccccggtggccttcatgaatccggggaactcgatcaccgtgccggacgcctggaacatcgcctcgccgtcctcgccggcaggagccgacagacgcacggtcgcggtggagccggtggcatcggccatctgggaagcgagcgtgcgctgccagatcagcgtgtacagtttcagctggtcggcgggcaccttgccggagagctccgccgggtcatggaaccgcgcgccggcgggtcggatgcattcgtgggcctcctgcgcactagcggtcttcgtcacatactgcttgggcccatcggacaggaacgactttccgaaatgatattcgacggcatcacgggcggcggcgatggcctcctgcgacaaggtcaccgaatcggttcgcatatacgtgatgtaaccgttctcgtacagcccctgcgcggcacgcatggtctgacgtgagctcatggacaggcggttgccggccgtctgctgcagcgtggatgtggtgaacggcgggagcgggcggcgacggtacggcttggtctccatcgatgccacggtgaaagtcgcgtcggccaggagcttggcgagggcgttcgcatgggcctcatccagctggcatacgttgtcagcgaaaccggacggcgcgagcttgccgtcatccgaaaaatccttggaacccgcaagtcgcttgcctccaagcgacaccatgcgcgattcgaatgacgccggctcgccctccgcgtccgtcgcgcccagcactgcggtcacgtcccagtaggaggcgcgcacgaacgccatgcgctcgcgctcacgctcgacgatcaggcgtgtggcgacggactggacgcggccggccgacaatcccgggcccaccttgcgccacagcacgggcgacagctcgtagccatagaggcggtcgaggatgcggcgggtctcctgcgcgtccaccatgtcctcgtccacgttgcgggtgttgcccagcgacgccttgatggcgtccttggtgatctcgtggaacaccatgcgcttgacgggaaccttcggcttgagcgtctgcaccaggtgccaggcgatcgcctccccttcgcgatcctcatcagtggcgaggtagagctcgtcggagttcttcagcgcttttttcagttcggcgacggttttcttcttgtcaccgtcgacgatgtagtacggtttgaagccatcgtcgacgtccacgccgaacttgccgaacctggccttgtcgtccgcgggaatctgactgggctgtgcaaggtcacggatgtgaccgaccgatgccatgacggtgtagccgctgccaagatacccaccgattttcttcgctttggtgggagactccacgatgacaagcttgttgccggtgcccattgtctctccttacctacaatgtcattggccttcatcatactcacgcggcatggtcaaacggcaaatcgcgcggctccgcggcggtcaccgcttcttcttcggcggggccggcggcgcccccaccaggccggctcggctcaacggggacgccgtgatctggcgcatcgccagcagcatcccgaacaccagcgacgaaacgccggctatcatcgcgaaggtggagacgtgggcgccgacgctcgcccaactcgcgctcaggctcagaccgggctcaatctgccacatgatgtatgcggcatagcagcagcacagcacacccgccgtgatcatcaccgtgccgacgatctgcacgctcggcgaggacgcgcgtttgccgggcgcgtccatgccggacgtgcgcgtgaatgccatcgccagcagcgcgaagccgcccgccagcagcaggctcatcaccacgtcgaccgggcggtgccatgcccccgcgatcaccgacaggccgatgaccagcgcataggcggccccgaccagcgccatccacgcacggcatccgcgcggaaccgcgaacagcagcagcacgcccgcgacgacggccagcatcgtatgaccggaaggcgcggaattggcgggctgagacacggtgttgatgatgaacggccgcggcagcacacctttaagatatgtggacgcgaaacacagcgcggcgaacaccgcggactgcccgaccagccaccaacgcttgcgtaccagcatcaccaccgccgcgacaacgatcagcagcgcggagacgattacggtgaagttcaacggatgcccggcgattgacgtgatattgcggctgatgaacggggcgaccagagcggacgcccacgacggcaggctgtcgtggaagccgctgaacaccatatcctcgtatgattgcccgtcctcggtgcgcacggcgatccaccatgcgccgaacgagatcgcgatcatcagcacaccgaacaccgcacacagcacacggctcaacacgcgcgggcgcacggtcagcgggtcgcgacgcgccaatccgcgctcgatggccgcctcgtcgtcaatgtccgccgcgtgttcgtcgggcgcggcggccttacgtttgcgcgcggccggcgcgggcgatccgagggcgcgcagcggatgatccgcgatcgtctccaaagcggaccatgcgctggccggggacgcctgcggcaccacgggttctggctcctgtttcgccgacgagcgcgcctgttctggtgcggggtctgatgccgacgcgccggatgacgtcgtatccgatgcggctgcggtatccggctcattcggcgtgtcagcgggcgcatcggtcgtctccgtggacggcaggcgttccgccgacgttgccgcatcagcccggtcgccgctgacctgcacggcgtcaggcggaatcgcaccgtcacgcgagatttcggcgggatcatcaacacgctgttcttcactcatacttcaagactgtagagcctgtacatgtgtcagtcgcctcatcgcgcccatattccgacagaataatcgaaaacctggccccggcatatcaaaatacgggttgaaatcgccgaaatctactattccccgtgtgaaatcgccgtttcaaggtccaaaaacggcgatttcgcacggggaattgccaagaacggcgatttcaacctgtaatttaagcctcacggtgccgcgacggtcagggtgaggggccaagaaaagaaaaagaaaaccttcacgtacccgacagaggccacttacccttgctgcattcctgccctggggggattgggtgacataacgccacgtgaaggctgtactagtatacatcacccccggatatcgggtgcgcaacgacaataatgcccctccccgcgctcgcgggaaagggcattatcggctatgggagactagcgacgcaccgcgtcacgccggcgaatgatcaccagcgtggccccggcggcgagcagcagcatgactacgcccgagatgccagtgacagcggcacccgtcttggcgacgccggcattgctgccgttctggccactgttggcgcccgacgcaccgggcttcgccggggcgccaggctggctcggcttgccgggcttcgtcggcgtgccggccttcttcaccaaagcctcttcggccttgaacagagcgccggtcgcgttgttgatctcttcctgagtcgcgttgtcgttggcgagcaccgccttggcggcatcaagcgccttgacgaacgcagcccacgaatccgccgtgtagtcggattccttcagcttggccgcagcatccaccgccgccttcagcttgtccttagacggcttggcggtcgcgttgacgagcccgttgatggcggttcgcaacgccgtgtaggcgtcgttgacctgctgctgcgtggccgtgtcggagtcgagcaccttcttcgccgcgtcgaaggcctccttgaatgcggcccacgaatccgccgtgtagttggattcctggtacttgctagcggcaaagaccagagtctccagcagcgccttgtcgatgttcttcacggtgtgcgcgtcgatgacgggctcatcggtctcgatgttcgggaagaagccgttcttgtgcagcgccagcaccttcggagcggtctcggacgaatcatccgcggtgtggacggcgaccttcgtgccgttctcgtcggggaagctgaccgtgccgttgccttcggtggcggagtcgccgaaccacagggcagggtggtacgcgtcgaacgagtcgtccttggaaccgcccgcagtgtcgacgatgtactgatccttcgcgccggcagcgtaaatcgactcgatctgtgccatgtaggcgatcggggcgaccttggtgtccttggtgaatccaagggcggacagcttcacggagagcacgacctggttggagtcggagacatatgcggggtcgatgggctcctcgtcaacgaccttgccggttgtcgcggaagtcgtcgtggcccatgcggtgtcgtactgcgtgttgccttcggtggtgctcaccgagatcatgtagtcggccttcatgtcgccgtccacgtcgaagatcacgtccggaatgaaattgttgcccaggtgggaccacgtcttgtcggtgatgatgccgaagctcagcaggccctgcgacggatcggagagctgaggtgcggtgctggaataaccgatcgcgcggatgtcacctgcggcaaggctgcgagcggcgtcaccgttgccggtgtagccgtcgaccggatcctcggcaccgtacacgaacgggacaagctcggagtggtagccggtggcggtgtcgccctggtcaaggccatggccggacacggacagcgtgcccttcttgttgttgaagccgctcagtcccgtggtggtttcggagattgccttcggcaccgaagtgacgggcacacgcagcgtggtggcgtcatcctcctgggtgaccggagtcgcggtgatgatgccgctggcgtcggtcacgtactggcggtccttgcctgcgacctgcgcggactgcgtggcgtcgcgggtgcgggtcagcttggactggtcgatgctgatcttcacgcggaagctggtgctggtcccggacttggcgaccacggtgtccccaccgttgtcgccgctcaccgagtacgtgacgcccggcaccggggtgcgggccgagtatgtgagcttgtacgtaatgtcatgatcggtgttgttcacgagccgcatggtctgcttgtcggtgtagccgtccttgccgaccgggatgacgccgaactgcgcggtgatggcctcgttatcctctccggcaagctgcacgttgttgttcactgcggcgagcgcgtcgatacgaccggagcccacacgcagcgggccgtacgcggtcttgcgatccgcggtgagcacgtcgtggttggcggtgttcatcagctgggccttgaccacgttggccaggtattcgggccgggcctgacggaccagcgcggcgacgccggaggtcaacggggtggccatggacgtaccgctcatgatctcgtcgctgttgccggtgccggccgaagcggacacgatgcccacgccgggagcggagacatcgggcttggcggtgccgtcataggagccgtggatgccacgggaggtgaaggacgcgatggtgtcttcgctctcgctggagtagtcggcgtccttgctcatacgcagcttggtggacagggtcaccgtcagcgtgccgtcatcgatggcgctctgcaggtccttgttctcggcggcgttcttgaccagctggaagccggggatgtcggcgttgccgccgatgccggactcggggatgttcgcctgcgagccgaacaggatgccggtcgcgccggccttctcggcgttgtcgaagcgggtcttggagccgcagttcacagcggcgtcgttccattcgacgtaggcgatgttgcccttgacggcagcggcgtcatcggcggagtatgccttgcagccttccaggttgtccttgtccttgacgcgcacgaccttgccggtcagggagaagtcgtcgagcttcgcgtagttcacggagtactggccggcgagggtctggcccttgagcgaggccgggccggcggtcacctcgacggcgtcctgcagcgccttgccggactggctcgcggccacggtcagcgcgctcttggcggtgccgggggcacccatgatgtcggtgatgtcgccgtcgttgccggccgcgatcacggacagcacgttgtctgcggtgaggttatccacggccacgttctccgggtcgtcggaggcgccgaagctgccgccgagcgacatggagacgatgctgatgcggctggactcgtcgccgttgacttccgcctcggtgttgtgcttggcgatgccgtcaagcgcttcgagcaccaggtcggtggtgccgccgttgtcgccgaacaccttgtacgagtagatgccggcctcgggagcggcgccggggccaatcttccagctggcgatgtcgccggcggtcagcttctggtagcctgcggtatcggtcttgcccgaggtgccgtcggccttgacgccgtagcccagcgcggtgccggcgacgtgcgtgccgtggtggccgccctggccgtcgatcgggttggcgtccggggtgggattgttgttgccggcgttcgggttatacgtggcgccggcgtaatcgtaaccgcccttgaacttcgtcttgtcgagcagcttgctgaccttcgggtcggtcagcgggtcggcggtggagttcagcgcggtctggtaggcctcggtggtgcctgcgccgccgaagtcggcgtgcgtgtagtcgaggccggtgtcgacgactgcgatgttcacgcccttgccggtcttgccggtctgttcccaagtcttgacggcgttgaccagctggtcgttgttcttgttcgcgggggcttcgccactgccgttggtcgtgtcgagcgccttcttgggcgtcaggatcgtgatgtgcgccaccgagccggactgctcggcgagcttgcgcagcgacgccgcgtcggcgcgaacggctacgccggacagcgcatacgaggtggagtagatcttcttggcgctggagtccagcgactgcagctgcgagaacacgttcaccgaggtcttctcggcggtcttcgcgctctgcgtggccgcctgggccgactgcgcgcgctgcttcagcgtgggcagcgcggaacgctgcctgctgaagttcttgagcacactgttcttgcgttccagcgcggaggggctggtggtctggatgaatgcggtgacctcgcccttcgcctgctgaagctgggatgagaccttgctcttcaggttgccggtcgacagagtcggcgtcgtggacgccgcgtcaccttgtgccggagccgcgagcgcggtaccgggcaggctgcccgccatcgccagggccgctacagcggcaacccagcgaggccattgcttattggccattattgttttcctctctttgcgtgcgtcactcacgacgacactgtgaaagaaactagacctggcgctcgtccgatatcgttacgttttgtcgcatcgcgtaacatttcaggaacatattgttaacactcacctcacaatgccatatacgccgactctcacgtcccgcgcatgacgcacgccatcgtcagacaggcagacctccatcagaccgcgcttttcagcccctcccatgcggccacagcgtattcgaccggcatccattacggcagtcgagcacgtacttccggatcccgacgcatccacgatccgcttatgcccggctataagaaaaaactatgaaaatcttcagctgacggtcaatatatgatacacacgaaccgccatgctgccttcggcggcccggatggcattcgattcaccaccagagaagcattgtcagcgaaccatcagcgacctacactaagttacggtagcgtaagttagtgtaggccgggcattccggccgcagcgaggtgatgatgatgagcgcgtcaatcagtgcaccatccatacgcaagtccgcggcgcagcgaaaaacagcgcggcgacaggccgcgggcggcgggatgcgggcggccgccacagcgcagaccgcaaccactgccggcatggccgcgacgcagaccggtgcctcggccaccgcgatgaaccgcgccctcgagcagtatcgcgccgcgcgcgcacgctatcgccaagccaaggccacactgaaagccgccgaacgccaggtcacgccggtcgatgcattcggcaaccgcaagcctcgactgcgcggatggcagcacctcatcaccctgccgttgtgcatcgccgcatccatcgtgctgatctgcatcgcgccggccggaccggtcaaggccgcatgcgcgatttacggcgcgtcggcgatactgctgttcggcaacagcgccctgctgcacgtcgtaccgtggcgcagcgccaaggtgacgcgcgtgctgtgcggcatcgactactccaacatcttcctgatcatcgccggcaccaatacgccggtgctgttcgcgctcagccctccgatccgatggccgtacctgacggtgatatgggcggcggcgctcgtcggcacggtgatgcatatcgtatggctgcgagcgccgaactgggtgttcaccgtcgtgtacgtggtgctggggctggcgccggtcacactgcttccggcgctgtggaccgcgcccgcggtgggtccggcggcgaccgtgctgattgcgtgcggcggggccgcctacattgcgggcgccacatgcttcgcgatccgcaaacccaatccgattccgggctggttcgagtttcacgaggtgtttcacatgggcacggtcatcgggtacacctgccacgtggtggccatatatctggtcgtgtgcgcgctgtaaaagacgccggacatgccgtcaccgaacgttcatcaaatcgttcacagggatggttgcgcggtcgataatgtgcggtatccttggtcgagctgagaacgaaacgcacatgacggccgttcatattcgacgcggggaacagcgcgaatcatcaaatggaaaggtcgcggcgcaaccggcaccgccggcgcgggccgcaacggaaggaagctatgaacgcggatttggtgatcgtcggcgcgggcctgttcggcctgaccatcgcacagcaggcggcggagcgcgcgggcgcccgggtcgagatcatcgatgtgcgcagccacatcggcggcaacgtgtacagctatatcgacgaggagaccggtgccgaaatccaccaatacggtgcccatctgttccatacttccaccaaacgcgtctgggattacgtcaaccgcttcaccgcattcaccgactacgtgcatcgcgtgtacgccacgcacgacggcgaggtctacccgctgccaatcaatctcggcaccatcaaccagttcttccgggcggtctacacgcccgccgaggcgaggcaactcatcgccgagcaggccggcgaactggccggcaccgacccgacaaacctcaacgacaagggcatccagctgatcggacggccgctgtatgaggcgttcatcaagaactacaccgccaagcaatggcagaccgatccggccgaactgccagcgagcatcatcaagcggctgcccgtgcggttcaactacgacaaccgctacttcaaagacacatgggagggactgccgcgcgacggctacaccgcgtggatggagcgcatgatcgacgacccgcgcatccatgtgacgctcggcaccgacttcttcgacgagagccagccgctcaacaagaaggcgctgcgcgccgccggcacgcccgtggtctacaccgggccgattgaccggtatttcggctatgaactcggcgacctgaaatggcgcacggtggacttcaaggaagtgcgctacgacgaggacgaccacttcggctgcccggtgatgaacttctccgacgcggacgtgccctacacccgcgccatcgagttcaagaacttcaacccggagaggcgtgacgcacagaaccacaacaggacagtggtgtgggaggaatactcccgcttcgccgagcgcggcgacgaaccgtactacccgatcaacacggacgccgacaaggcgctctatgagcggtacgcagccagggcagccgccgagccgaacgtcgtgttcggcgggcgcctgggcacctacaagtactacgacatgcacaacgtgatcgacgccgccctcaccgcatatgaggagcaggtcgcgccgatgctgcgcgcccggtgacaccgactggcgggcacttccgccgccgcctcttctcatttcatccggatctcccgcccatcccatccggccacagtctcatacgctcaccggaaagtggggctatgaccggatgaggcaacgccgcaccgctttggtcgggcccaaaccagcgaagcattcatacaatcccacaatgcagaatccgactcacattaaggacggtcatgaccgtcaccgtgcgagggtatcgtcactgtgtgagccctcgcacagtgacgcatccggctaaaacccttattttccaacgtttctcacgataccgtcacgccgagaggctatggttgtggttttgctagatatagacaagcaccaagcacgatatcgacgtttgtaaggattcagaggaaaaccggtgaggaaagcgcgaaaatatgcgcaaaccggttcgcatcatattgcaaggactacggtagaatcatggcttcacatacgcgcactgttaattccagttcaggccgacgcgcggcaggaacgtccggccgtcgggccgccggcgcctcaggccgcaccgcgaccggcacccaagcgggtgcagcgacgggcacgagaaccggcggcaccgccgcaaccaacggttacagcgcgcagcgcaacagcggctcaaggcgtggccgcggcgctaatccgcccgaaggcacacaccgcggcggcggcacccaccgctcccccggctcgaaaggcccgaaagccaaagggcgcaagaagcatctgattctcaagtggacgctcggcatcatcggcctgttcctcgccgtcggcatcggcgcgttcgcctacctgtacgccaccatcgaaatcccccagccggagaccatcgcgctggccgagaaaaccagcgtgtactatgcggacggcaaaacgaaaatcggcacgttcgccgagcagaaccgtgagatcatcgactgctccgtactgccgaaatacgtgggccaggccgtggtcgcctccgaaaaccgcacgttctacacggaccgcggcatcgacctcaagggcatcgcacgggcgctgatcaacaacgtcaccaagggcacccgccagggcggatccaccatcacccagcagtacgcggaacggtattacctcggcgagaccaccacctacatgggcaagctcaaggaagccatactggcggtcaagatcgcgcagacgcaagacaaagacaccgtcctgtgcaactatctcaacaccatctatctcggccgcagcgcctacggcatccaggccgccgcccaggcgtacttcggcaaggacgcgaaagacctgactgtgcccgaggcggcgatgctcgccggcatcatcccgtcccccagcaactgggatccggccgtcaacgccaagcaggcgaaatcgcgattcgagcgcgtcatcaacatcatgaaagaggacggctacatcaccgccaaacaggccagtgaagccacgatgccgaaaaccgtcaccaacgcacagcagaacatctacgagggccccaacgggtatctgctgcagatggtccgcagcgaactcatcaactcaaaggcgttcacgcaagacgacctcgacaccggcggctacaccatcgtcaccaccatcgacaaatccaaacaggatctgatgtatcagaccgcgagccccaccaagggcaacgcgggcatgccggacggcgtacagaccggcggcctgtcggtcaacgtcaaagacggttcaatcatctcgctgtacgcgggtgaggattacctgaagaaacagctcaacaacgtcaccgacgcgacctacgaagtcggttccacgatgaaaccgttcacgctgctttcgaccgtccagacgggcgtcagcctcgatactgtgttcaacggcaactcgccgcgcagcttccccgggctgaaacagccgatgtcgaactcgggcggcgctagctacggctacatcaacctgtacaaggcgacggcgaactccgtcaacacggtgtacatggatctgcagcagcatctcggcgcggacacgataatcaagaccgcgcacacggccggcatcaaaggcaagatcaccgatgacggctacgtgacgctcggcaactccggtctgagcatgatcgacatggcgcgcggcttctccaccatcgccaaccagggcaagaagccgacgctgcacatcgtcgccagcgtgaagagcagcaaggggtcggaactgtacaaggcgccatccaccgcggagcaggtgttcgacgcgaacgacaccggactggtggtcaaggcgatggaaggcaccatccaatacggtaccggtcgtgcggcgagcgcgatcggcaagacgatggcgggcaagtccggcacggcaaacgacaacaaggccgtgagcttcatcgggttcacaccctcgacgctcaccatgttcgccatctggaatcccggagcgaacggcgaggcgctggaactgccgaccatcaacgggtattacaagggcatgggatatccggccgtgctgttcaccaactacatgtcgagggcgctggagaacgtggcggacgagaagttccccgacgtgaccgacagcggcaagatcggtggacccgacggcacgtggggcaccggttcgcaatactcgtcgtggggcaacagcggccagtcgcagagcgggaattcgcagggcggcagcaggagcgacgaccagccgtcgcagagcggcacgcagtctggcgacgggtcgggctcgcagtcgacgacgccgcagaccggcaacggttcgaatggcagcggcaatggatcgggcggcaacgggtccgatggcaacggagggaacggcggcaacaacgggaataacggcaacggagggaacaacggcaacaacggcggaggctcggattgcgcgaccgatcccaccgccgccggctgctccaccggcaatgaatccagcaccaacggcatagcgtcgcagtgagggacgaggccggattcgcggttattagcgtgcgttgaccatccccaccggcgggggcacgagggctaggccccgtgcgactggaggtggttccggcctctcacgaccatcaaaaaagggtggctgcagttcaaatcctgcagccactctttcgtttaccgcgaaatatcagcgctgcgaacggttgatcgcggagatgatcgccttgagcgcgctggtggtaatcgaggagtcgatgccgacgccccagatgatctgggtctcagcgtcctcacccacctggcattccacgtaggacgcggccatggcgtcggtaccgacggacatggtgtgctccacgtaatccatcacggacgcctcaatgccgaggttggaaaccgcgttgaggaacgccgcaatcgggccgttgccgatgccggagatctcacgctcgtgaggttcgtccacgcccacgttcacgccgcggtcgagcacacgcgccttgagcacggtgtctgaaccatcctcgccggaactgacggccaccttgagcagtttgaggcggccccacggagcgagcgtcgcgtcatgcgtatcgccgacgaccacgccggcggccgtcatgccggactgctccaccggcaggtactcgtccttgaagagacgccagatgtcctcgtccttgacttccttcttggtcgtgtcggcgaagttctgcacgatcttgtcgaactccacctgcagacgcttcggcaagtcgaggttgtggttggtcttgagcaggtaggccatgccgcccttgccggactgcgagttgacgcggatgatcgcctcgtaggtgcggccgatgtccttcgggtcgatcggcaggtacggcacgagccacacgaacttgtcgagatcggcgccgactcggtccgcagcgacctcgcgggcttcgaggcccttcttgatggcgtcctgatgggagccggagaacgcggtgaacacgaagttgcccgcgtacggatgacgctcggagatcttgatctggttgcagtactcgacggtcttgcggatctcgggaacgttcgaatagtcgatctgcggatcgatgccctgcgtgagcatgttcagacccagcgtgaccagatccacgttgccggtgcgctcgccgttgcccagcaggcagccctccacgcggtcagcgccggccagcacggccagctcggtggcggccacgcccatgccttcgtcgttgtgcgggtgcagggagagcaccacggcgtcacggtcgtcaagatgcgtggacacgtactccacctcatcggcgaacacgttcggcgtggtcatctcgaccgtggccggcaggttgatgatcatcgggtgctcgggggtcggcttgatgatgccgatgaccgcattgcacacctcgaccgcgtattccggctcggtaccggtgaacgattcggggctgtactcgtaatacaggtcgatgcccttggcctcgttttcaaggtccttgcacagctcggccgcgtcggtggcgagcttcttgatctcttccttgttcttgcggaacacgacctcgcgctgcagcacagagaccgagttgtagaagtgcacaatcgcacgcttggcgcccttgagcgcctcgtaagtgcggcgaatcaggtgctcacgacactgggtgagcacgacgatggtcacgtcgtcggggatgagctcgcgttcaataagcatgcggatgaagtcgaaatccgtctccgaggcggacgggaagcccacttcgatttccttgaatcccatggagacgagcaggttccagaagcgcagcttgcgctcggagtccatcgggttgacgagcgcctggttgccgtcgcgaaggtcgacggagcaccagcgcggggcacgctgcagacgcttgcccggccacgtgcgctcgggatagtcgaacggcacctgcttgtcgtaggcgacgtacttggtgtaaggcatatcgctcggcttctgcggctcgccgatgaatcgtgcgggaggcagcagcgggtcgttgttccccccattggacgccgcggcgaccgccgcaagatcaaacactgatgattgatcctgacccatatctcctcctttacttgatgatgccggcgcctgttgcctgccggccgtatgttgtcgtcgcacgataggtcatgcaattaatcagtctagcgtgaagcgccccggtaaaccgccgagatatcaagaatgcggccaatccatgcggccttcggagcgttatctcgcttccgagggggtgatttcaggcccgccgaacatctatctgcgtttcaaggggttggcgttgctcgatattcgaggtattgcatgatggacgccactggaatcatgcggctcccatgccattgatactcggccaccaacccctcgaaatgcagatagatgttccggagcgtccgagtcaccccctcgaaacgtagataccctgccgagataacgtttcggcccctctccggacgcccgttgactgcatggcgacgcccgctccacgcgtggtggcgacttcgcgaagagtatggcgccgcacagggcgactcgctacagtggagggcatgacactgcgttttcacgacgacggcacgttccgcgtgctgcaaatggccgacattcaggacggcccggaagtcaaccgcgacacgatccgcatgatcgaggccgcaatcaacgaggcgaggccggatttggtggtgttcaccggcgatcaaatccgcgggtacgatcccgcgtacatcgacacgttcctgcgccggcgcggcgagaaccccggcgcacgcgtacgtctcgtcaccgaaatcgaggcgaagctacacggcatccacaggcgcatcgcggcgcggcgcgatccggacctgccaccgcaggacgatgtggtcacgatggacgacctgatgaacgacacccggcagaaagtgcgcgacacgttcagcgcgttcctcggaccggtcatcaacgcgggtgtgccgttcgccgcgacctatggcaatcacgacttccagtgcggcatcctgcctgacgagcaggacgacatctaccgcgagttccccggctgcctgaatcccgaggccgatgtggccggcggctcgccgttggccatcgagccgggcacattcgcgctgcccgtgctgtcctccgacggttcggagcatgtggcgatgggcgtgatgctggtcaattccggcgattatgcgggcaagccggaggagaatgacgcccagtacccgcggtatgtggcgcattcgcgcggactcgacctggcggattcggacggctacggcacaccgagcgctgaggcgatcgcatggctgggcgacgtgcagcgcacgctcgccgagcgcaacggcgatggcgaaccggtgccgtcgatcacgttccagcatattccgccgcaggaattctatgactgcctgaccgaggtcccggcatggacgccgaacgccgtggagggcgcccgcaattacgccgggcgctgctacgtgctcaacgacgccgtatgccggccggggtcacggctcggcgaggcgatcggctgcgctgacgagaacgtcggcgaggtggacgcattgcgcgaggcgggcggctatttcgcgttgtactgcgggcacgatcacaagaactcgttcgtcgggcacgtgcatgacctcgatctagggtatgcgccgacgtgcggcttcgaatgctacggtccgaagtctcgcctgcgcggcatccgcctgttcgagttccgcgaggacgacccggccgcgtatgagacccgcatgctcacgtggggcgacctggtcggccgttacagcggcaatgagttgcgcgtgttcttcgaggatcattgcgtgacgggcgccgcgaccctgcgcaacgaactgcgccggccgcaggtgtttgccaccgtcgccctgaccctatccgccggcttcgcggcaatcgtgcgctccatcgcacggcgtctgcgacgctagcgcagcggcggcaaacagacgacaaagggcatggttccggcggcgatatcgtcgacaccatacctattcatatccgccgtatatccacccggctcatccccgggccggccctacctctactcggtcaggtacagcacgttctcgtcaagggggaacgacgttcatgtggtacccctccattttcaggaacggcttggagctgtcaggcttggcatggcctgacacgtcggcaactggtagctcgcgccggccagtccctccagtttgttgctgctgatgccggctggcacatagcaggatttgaatcctttcttgccgccgcagcgatagtcgctatccggccccatgagctcgatgccgacgtccgacggcaccttccaccaaccgtcaccacccgtgtccgtccggcgtgcagcgtgaccgactgcggatcatcggggctcagcatgagcttgcccgagccaaccgaggcggccttgcccttgtcgtccaacgtcaggcaccaactgtcgtctttcaggcagtatttgcctgctatcggctagaaatcgcctttgccgagtgcggtgcgaacatccgtcaggctcatgtccttggtgggcttggccgatgatgcaccgccgtccacgccggcgctgccgcccggctacttgacatcggcgtcgggcagctcaccccaatccaggtcgatggagacggtcagatagtacacggtgtcgtcgctgggagcgggcttcatcttgacgatgtcgcttttgctgccgacgtagccgttgtacggcatgaacgggttggcggagttattggtcatgtccgccgtggtcttgtcgtagagcttcgggtcacggtagatcaggaacggcttggtcgtgttcacggctttctgtttcttggccgcggccagcgcgtccgcgtcaaagtacccgtcgctttcgagcttgttcaggtccgcgccgaccggcacgaccagatagaagtcctgcatgtgatacgtcgcgccggagatattgttgtaatcgccgttttcgaccatcttgccgttgttgcagacgatgccgcctgccgtattcgagtcttcctggctggtgccgcaccagtagttcgtcatactggatcgcgggaacagttcgaacgcgccggtgtcaccggtgagcaggtagtcagctttcgggctggagcagtacggctgctggatggcatcgcaggagctcagcgactcgtattcgccgtattcggtaccgtcgcgacctttcggataggggatgtacgagttgccttcgctgccatcgccgccatccttgaacgtgatgcagtcaccggagttgttgcaccacgttcccgcggccacaccggagacaccgagcagattgtcgccgccggtctccggggaatcgtgaaccgtgtaggcgtccttgacgccgctggcgtcgatgccgtaatacagcgtgaccgcatcgccttccgctactgtggatccgggcatcgggtcggaaccggacactttgccgacgaacttcttcgaggcgaggcgcggcacgagcgtcacgtcatgtccttggctttccagttcggatttcaccgtgtcgacgtcccggccgacgatgtcgatgctgatggcgccgccgtcgctcttcgtggcgacgccgatgtagatgccgtcgtccttgtcgccgtccgacagcgcctgtccttcggcggggtaggtcgccaccacggaaccaattggcttcttcttggtgtcggacaccggtacctgcttgtaatgtaccggcacacccatcgtcttgaacgtggatacgaccttcgtggcctgcttgcccatcgtgttcttgggcacaccggggccacccgactcctggacgattaccgcggcgtccttctggacgcgatcgccgggcttcatgccctcgtatccgaggaacacgcccttcttcttgccggagaagatgatcgccttcgatgccttcacacccttggctttcagctgggtgaccacgtcatcggcggtggcttcgccgccggacgcaccggagatctcttcggcggtaggcagcggggttccgccccagatgcccgcgcgatacgtgaagaacagggcaagaccgatacccaacgcgagggcgatcaccacggccacgatgaggccgatgagcttgcccctggatttgggcttcggcgttttccctggcacggccggcgtcgccgctgatggctgggttgcgggcgcggccggagccgagactccggcacctgacggctgggcgaactgctgggcttgcggccacgccggttgggcaacaggctggagcggctcctgaggtgcagcaggagccggcgcgaatccgccgcctggcagtggtacagctggagtcgccggctgttgcgccgcagagggctggggcatctgcgatactgcgggctgcgacgccggcgcggcctgtgatacctgttgttgcagcggctgcccgcagttcccacagaatttgctgtccgggctctcgtcattcccgcaatatgggcacttcatgcgtgtccgcctttctcccccgcccaatggcgtctctcatcattgcccgccggcgcgaaagcgctcgcgaacacatcaagaacatcataaaaccgggcgtcgtacaacacagtgtcacatatcaggaaacaccaagcatccatcggtcaccctcgcacagtgacacgtgcggcggcccagcgaaggcgacagacaagcgctccagcgaaattcagtggaacagactcacgccgcgccgggccatgcagtaggcgttacccagccacgtgtgccgcgagttcggccacacggcccccagacgcggcgcgttctggctcatccagatgctgggcacgcgcccgtcggcgctgcgagagccgagcaggttgaacccgttcttgatctcaagccaatcggggtgctgcgtggcaatggcaagaccctcttcaagggtcagtggcgtgcgctcgtcggaatcgatgagcttgcgcgccacgtccggctcgcgattgatgtagcaggtgccggtatgcggctcgacaaccagatagaacggcccttccggcggctcgaacccgtcctgcggcaggaagcttgcgatgtcgcgcggaggcattgtcgtgaaaccggccatgcggttgatgctggttcgggcgatcagcgactcaggcgacaccagctcgcgcgtggggatcagcaggatgttcgagcccagatcggtatgctccaacgcatggatcagcggccgtgcgagcgcgcggaacgcggcggcgctcatgtccgccacgtccgggtaacccagcgccacgatacgatccagctgcttctgcgcttcctgcgatgctattgacatgcttccagagtaccgcgaatcccggccgcagcacccacccatcggcgaacacggccatcattcgggaaagcggcccgtcttgttccgcgcattccgtaccattggataggtgcggccatgtcactgcggccgcttgtataggaaaccgaatcaaacccagaggttgttatgtccgaaaagttgaaggtcggcattcttggcgccacaggtatggtcggccagcgttttgtgacactgctggagaaccacccgtggtttgaggtggtcaaactcgccgcgtccgcgcacagtgcgggaaagacctatgaagaggccgtcggcccccgctggaagatggaaacgccgatgcccgagtacgtcaagggcatgacggtgcatgacgtcgccgatgtggccggcatggccgatggcgtcgatttcgtcttctccgcggtgaacatgtcgaaggacgagattcgcgcaatcgaagaggagtacgcgaagaccgagaccccggtcgtctccaacaacagcgcccaccgttggacgccggatgtgccgatggtcgtgccggagatcaacccggagcatttcgcggtgattgagcaccagcgcaagcggctcggcaccacgcgcggcttcatcgccgtcaagccgaactgctcgatccaggcgtacacgccggcgctggccgcgtggaaggaattcgagccgcgcgaagtcgtcgtcagcacgtatcaggcgatttccggcgcgggcaagaccttcaaggactggcctgagatggtgggcaacatcatcccgttcatctccggcgaggaggcgaagagcgagaaggaaccgctcaaggtgttcggtcacgtggatgccgacaaaggcgagatcgtgccgttcgacggcggtctcaagatcacttcgcagtgcatccgcgtgcccgtgctcaacggccacaccgccacggtattcctgaacttcggcaagaaggccaccaaggaagagctcgtcgaccgcttggtgaactacacgtccaaggcgtccgagctggggctgccgcacgcgccgaagcacttcatccaatacctcaccgaggatgaccgcccgcaggtcaagttcgatgtggactacgagggcggcatgggcgtgtcaatcggccgtctgcgcgaggattcgatctttgactggaagttcgtggggctggctcacaacacgttgcgcggtgccgccggcggcgcgctcgaatgcgccgaaatgctcaaggcgctcggttatatcagcgcgaagtgacggcagcctgccgctgagactgaaattgcggctggagaccatcgaacggccgggttgaccacggattgattccgcagtcaacccggccgttcggcatatcgggtgtcgtcaccgacgcaggtgacgtgcattgccgcgcggattacggcggaatcgtaccgtaacgatcacggcgactatgaccatggcggcagcagcagtgtggcggcgaccgtcgctgccacaaggagccgcataattccgttggaacgttccatgtgctcctccttcggctcaggagcgcgaatgaatacggaaggaggaggtaagaacgctcaaaccagataaattgaccacccagccggctcctgctgtcggagatattccgcgtagcgggcggggtggtcaattacgcgattgcgtcaaaaatcagcgaccggtgccgccgtagaccacggcttcgacctgatcggcgtcgaggccgtaggcggtgtgcagcgcgcgcacggcgtcgtcaagctggtcgagcgggacgagcgccgcgatgcggatctcggatgtggagatcatcagcacgttgatgcccttgtcgctcagagcggtgaagaacttggccgccaggccggaatgggtcttcatgccaacgcccacgaccgcgaccttgccgacgctcctgttgatgtcgaacgacttgtagcccagctcgtcatgcttgtcgatcagcacgttctcgacttccttgacggtggattccggcacggtgaaggagatctccgcggtgcccacggacgcgccggcctgcacgatcatgtccacattcacaccggccgtcgccagctcggtgaacactttcgccgccatgccgggctcgttcggaacgccgcgcacggtggccagcgcttcgctgcggtcgtgcgccacaccggagatgaccggggcttccgggccgaggtcggggaacaggtcacccatggatttgctgttgttgtcgctcatgttttttcgcctttatatttgtgtgaacggtaaatcaggtctcgaatatgtcgtatgtcagtggacgacatcagtcgatgttgggcaggctgcgcgggtcgactccgtcgggcacgatcagcgtgccgggacgatgcgagaaggagctgcgcacgtgaagcggcatgttgaaccgctgcgcgtactccacgcagcgcagtgccagcaccttcgaaccgcaactggacatctccagaatctcgtcgtagccgatgaccggaatgcgactggcctttggcacgatgcgcggatcggcggtgaacacgccatccacgtcggtgtagatctcgcagatgtcggcgccgagcgccacggcaagcgccacggccgacgtgtcggagccgccgcggccgagcgtggtggcgtctcccttggcgttgatgccctggaagcctgcgacgatggccacgtctccgagcgacagcgcgttctgcacgcggtcgggcttcacggccttgatgtgcgcggcgccgtaacgggtgtcggtgaagaatccggcctgctgaccggtgaacgaatgcgcacggtccccggcggcgtgaatggccatggcaagaaggctcatggagatgcgctcaccggcggtcatcagcatgtccatctcgcgctcgggcgggttggagtcgatgctcagcgcttggtcgatcaggtcgtcggtcgtgtctcccatggcggagacgaccacggccaccctgttgccctttttcttggtctcgacgacgcgcttggccacgcgcttgatcgattcggtatcggcgaccgacgagccgccgtacttctgcacgatgagagccactgctgtcctatcttctcgcggaatgcatctgcgtcaatactacgcaagcggcacgattataggaatttcggcactgccgcgcacgcgtgcgccgccatgcggacaggaacggccgcgctgcgggcgcaggtatccgggcgatgattcgcgtcggcggcgccgggacgggccgacgctggcagcctcgtttatgcttcgcggcgacctgtgagggcccgaccgagcgtgacctcgtcggcgtattcgaggtcgctgccgacgggcagaccgctggcgagccgggtgaccttgatgccgagcgggctgagcagacgactcaggtatgtcgtcgtcgcctcgccttcgatgttggggtcgagtgcgaggatgacttccttgacctcgtcagtcttgaggcggtcgagaagcttggggatgttgaggtcggccggtccgacgttggccatcggattgatggcgccgccgagcacatggtattggccgcggtattcacgggtgcgctcgatgctcatcacgtccttcggctcttcgaccacgcagatcaccccgtggtcgcgtctcgggtcggcgcataccgggcacggactgacctcgcacacgtttccgcagatgtcgcagaaccgcactttttccttgacttccgtgatggcgtcgaccagcttgcccgtctcctcgtcggaggccgacagcagatagaaggcgatgcgctgcgcccctttcgggccgataccgggcagtccggcaaatgcgtcgatgagtcgctgtatcgcgccgtcatatgccaaagccattggtgtgctcactccgaatcatgtttgttgacgtgctggatgttcctggggttcttggggtcgtcggggccgtattcctccaccggcttgacgacttcgaagaactgcttgacgtcgtcgagactcatcgtctcgggcgagccaagtgaaacgtcattcatcgaatattcgtcgtcttccggcgccacggtcggcatgggaatgtcctcctgcgcatacgggtcggctccggcgaacggatcggtgtcgtcatacgcagggcgggatgctctctgaccggccgcggcaccgggagtctgctgcagatgcgtcgttcccggttcgactccggggttttccgggcgcccgggtgcagccaagtcgtcggaaggcccttggagagctgccggggagtctgcgcttggcgcggcgatgctcgacgaagcggaagcgactgatgacggcatgccagcccaggggtcttccgcggacatggactccggcacggcggtggggccagggttggtgcgctcggagtcctctcgcgactgtgactgcgcatgggcaacgttctgaggtgtgccgggcgcgtcgccaccgcgtacaccgtcaacgggcatactgttaccgccgtcgttggcccacgggtcggtgtcgtcgctcaaatccggcacgacgatgtgtttcgcgtgatggccctcatcttgcggagcattccgtgaaacatcccgtgaaacattgcgagacgcaccgtcagtcggtgaccaagcgtcgccagcccccgcttccgggagcgcccacggatccactgccgactgcgcgtccgcacgcgaggtatcctgtgcgaccgcccggttattgtcgcggtcatgagccactgtcgcgtccggcgcgtcgggtacggctcgatggacttcgtccgcatcggccgatgcggtgtcgccgctttcgggaggagtctgcggctccttggcattgttgccgacgctcatcgcccccaatgatgcgctgagactcactttgacgatctgggcactgatgcgctgctgctcgtctgccggcagctggccgaacggcggcgcgacctgcccgtcggccatcttcttggtgggcgcgagctgcactttgtcgccgaacgccttgcgggtctcagcgcgcatgatctgcaccacgttgcgggttccgccgacttcctcaccagcgacggccttcgcgaaggcatacttgctcagcgccttgtcgaacttgatccacaacgtgccttttccgcctggctcgtgctgttccaagtggatgcgcggcaccttgctgcggttcacgtacgcggcgacgtccgccggcaatccggcgaccagtgcatcccagcgctcgtccggcgtgcggtcgtcgccctgcggagaggattgcgcggctgtcggctcaccggccggcggtactcgagaggcggacggtgcttgagcgacgggagacggggcaccggcttgcgcatccgctgttgcaggcgcttccgccatagtgggcgcttccgtctggagtgcgcgatcaggttgggtgccggcggttcggcttggtgacgtattcgtctggcttgccgccgattggcgagcgtccgtctgctggttgcgagcggatccgatgaatcctcccctgcgcggagtcgtcccgcctgaccggctctcggcgatgccgcctgttcgcgcattcactcctgcagctccgcggccagtacctgcagagtccgccccgggcgcagtgccgcccgcggccggcgcgacatccagtccctctcgcccggcaagtaagcgcgcggcgagcaattcgagccgcatgcgcggagaaatcgccccggtcatagaccccagggtggtattgatggtttctgccatcgacgtcaacgcacccaagccaagcgacgacgcctgcctacgcaggtcgtccatgtcctcggcctcggcagcatcggaaagcacgctttctgcctgagcgccgcccaatgtcagcaccagcagatcacgcacccgcgccagcagatcctcgacgaaccgacgcgggtcgaatcctcccaccacgactttctgcaccacgccatacagcgcttcgccgttacgcgcgatgacggcgtccacggcctcgccgatcagcgcctccggcgtgaagccgagcagcgccacggcggcgtcgtgggcgatcacgccgtcaaccgcgccgaccatcaactgatcgagcaccgacagggtgtcacgcaccgaaccgccgccggcgcgcatcgccagcttgagcacgccgggttccggcttgatgctttccttggcgcaaatctcctccagatacggtcccatgacctcctggggaaccagccggaacgggtaatgatgggtacgcgaacggatggtgccgatcaccttgtcgggttcggtggtcgcgaagatgaacatcacatggtccggcggttcctcgacaatcttcagcaacgcgttgaaaccctgctgggtgaccatgtgcgcctcgtcaagaatgaaaatcttatagcgatcccgagcgggggcgaatccggcgcgctctcgcagttcacgggcgtcgtcgacgccattgtgactggccgcgtcgatttccaccacgtcgatggaacctggaccgccagtggcgaggtccttgcaactggcgcattccccgcatggatgcgaggtcggccccttggcgcagttgatgcaccgcgcgaggatacgcgcggaactggtcttaccgcagccacgcggcccggaaaacaggtacgcatgcgtgagcttgccgctgtcgagggcccgcatcagcggaacagtgacctgatcctgaccgatgaccccctcaaacgtgtccggtcgataacgtcgatacagtgcaagtgccataagctccaacctatcgcaacccggctatttccgggtgtctttccctattgtccccattacttgcgcacgcatcgggggcttgcccagatggtgccgccgcggcgacgtttgcggactcgtcaacgtcaatcgttggcctgtcggccgaaagccgccggacaggcaggctccgctcaggcggactcgccggtcagatgaattcgccggtcaccgggtcacgcccgtcgcgctcgatcgccgccatgatatgctcctcgctccggctgtcatgccagtgggcgaccgcaggcgggaccaatacgcgcaacgccttggcctgcgcggtgacggtcaccggaagatgcccgacgtactccccatcggccatcagcaccggaggctcgtctccctcgtgggcgcgggttatctccacctggcgtacacgcttccagttgaatatctggctggcgagcaacctcccgttataggcgttggacagcgctttggcgcattggccgacattcggcttgcagttcagccacaccagatccagcattccgtcatcaagcaaggagtatggagacacctccagtccgcctccgatgtaccgtgcattggcgactgtgagcagaggagcgatgatgtcgtgttcctccaccgtgccgtccgacagcgtggccttgacgtgatagccgtactgtttcatgcgtgcaatctccaccagcaccgccgcagcgtatcgcgctgaccctccgggaaggcgcgaacggttggcccgatcgttgatgcttgcgtcaagcccacaattaagcatccccgcatagtatcggtcgatcagcccgttcactgggcggccttcctcatccaccacgggctcaccggactcgccatgcaccatgcaggcgatctccgtcgagcgcacgcgtcccatatcgacatccagataggtgccgcatgcgatggcgccgacgatgccttccaccgcggttttgacccggttgacgggcagtttcagacctcgcgcgaaatcattgcccgaaccgaccgccacaatgccgagcgggatgccactgccgcagacggcgttggcccccaaggcgatcatgccgtcgccgcctacgaccaccaagtagtcgtatagggcgcggttctcgcgagcggccgtcagcgaatcatcaaagctggtgccggtcagatccattacgtcgaatccatgccgctgtccggcttcggccagcatcgtgaatacctgttcgcccacgacggcaccccaccccttgtttgagacgggattgccgatcaacgccaccattgtcttcgcttcgcccatacgtcaaacataatgcatcaacggcattccccgccagtacaggctccgcaatcggtctcggcatcggcatcaatgctgtctgcccacacccgccgcgagtggcccatcgactattcacagctgatgggcccggcgcgggaacgctggctgacacgtgacatgaatggcagacgcaacggcacggacaccgtcacgacgatgtcatctccctcgacgacgcacgactccagttgcgcgtcattctctgccgcggcacgccgccctacggcacacggatcggatgcgccaccagaccagtacgccgacgccgccgacaatgccgtggcatcggcagcgctccgcgcacgcgaccggcagagcagcgcacctccgaccgatgcgacggtcgctatcagtgcggccgcgagcgcgatcagcatcacgcaggccatcgttcccgacccttcatcggattgcatcagccgcgagcaataggctcgcacgggcgatggtctcctaggttgaattcgttgcgccatcgtgttttcctttcgtcgctattccaccgcatcagaggcaagctgcgcaggggagcttgaccaccccagcaactgcgcgacagcctccgccagcgggagggcaagacggcacagtcgctccacgacagccctccgggccctgcaattacagacatgctacgcatgccgcccattgggttcactgacgttcacccctcgcctacaaacagctctgctgtttgctcacggctcggcccgccagcgagggcaagacggacttaggcatcaccgccatcctgtggccgagccggttactttgacgggtagaacgccgaatggatccggcagcacggggcattgcgccgtcacgcgtatcgaatgaccatcatcagcgaccgacgccaccgcgccttcgcccgcgataccactcgccacggcgttgacggacatccccgctcccgataggccgccttccctcgtcaccagttcgcgaactacggccgacgcggcatcctggcatcgcatggacaccgtgaccgttctcgtcaggcagagcaacaccatcgccaccatggccacagcgggaagcaccaccgcgaactccgcagtgacggctcccctgtcagcatgtgacatcgtcgccatcgtgaatgcccgtcatcccacactcaatgacttcttgacgatgttggtcagcaacgtcttgatggtgtccgatttgagcaacgcgaccagcacggccgcgaagcctgtggctgcgaccagcaccaccgcgtactccgcggtggtggccccttcctctggctccgcgctcaacgtgcgcagccgtgcatccaacaggcaaatgccccgccgcgccgacgcccccatgttgcccaccgtacgtgtcatcgccgcaataggcccggtacgtccgtcaatggcaatcatcgtctcctcgatattcatgacaatcctttctcgactgaccttgcccaactacaaggcactttccactgtgcctcatcaggcccgcccaccatcgggttttcgggcaatgtggtcgaaggctgccgagttatccacaatgcggcgtgtcatccacacattatgtggatgacagatggccgtgcagcattcttcaccgaccatcgggcggcatcgccaccaagttcatcccacgaacgccatcaccgaggggagtatgcctagaaacacgaacgccggcagcatgcacaatcccgtgggcagcagcagtttcaccgacagagacgccgactcctgctcgatcgcggttcgctcgccttccatccactgctccgaagccgtcgtcagacggccgatcggcgaaacaccacgagtccacgatggctccaacgcgccacgaaggattgccgaagtctccgcataatcaccgaaatcggcggcattccaagcatccttccatgacgatccgcggtgcagagcgtccgcaaccgcacacagcccgccgccaagagcccctccgacagcctcacccacgccctccagagaacgcgtgacagacatgcctgaccgcagcgacaccgacaacagtccaatcagcaacggcaacgacacagcagcacccccttctcccgcaacatcggacggcacgccagtcaagcggcccgaccgtgccgagtccggccatatcatcgatgccatcaacaccatgacggcgcacgccatcgcgttccacatcaccccaccccttaatgttcatgacggcaatcagacggtatcaacgttcgtgccggtgttccgcatcatcgatgacatccacagcagtcccagcgcgtagcctgcgccgcccaccgccaggcacgcattgccctgcgcggagccgaacagtacctgcaccgggcgagcgcccagcagctctcccaaacctatggtgaccaacggcaacgcgcccaacagcgccgccgtcgcgcgcggaaccgcgaaagcactgcgtcgggaatcatgcaacagcctggaaatccgatggttctcgccgaccacatccagacaatcggcaagggagcatcctgaccgctcgcacatcgcacaggccacggcgagttcgaaggcgacatgttcggcctgggcggcgctctcccccggcattcgctgtcgcatcagcagccgtttcaaccggcttgcggtcaacggcacccctgcgaatccgctcccgtcgacatcggcaagaacatctgagatcatgccgccggcccgaacagacgaactcatatgcgcgatcacgccggacagccccatcacacggccattacggacggcatcaccggcaccggtctttcgccctgctcgcggcaccctcgaagagaccggcaacagggcacggccgcgaggggcatacggccacagcatccatgccagcacgaccatcagcgcgacgcatcgcggcaacccacccacgctcatatgtctcacctcacatgcctcattcacatgatccatctcacatgccccatcgcccggtgaaatcatgccagcgcgggcatggcatcatggcgccctcaccgtcccacaacgccaccacgtcgccggacaacactccgtcgcgcatgccgaggcacccgatctgagcgattctccggcgaccatgatgccgctcaagatgcagcatcacgtcgaacgccccctccgccagcatcgtcaacgtatgcgcgtcaaggccggccagcatgcccagcgcgatcaatcgcgccggcacccggtcaatgccatctgcgtgcaatgtggtcataccgccaaggtggcccgaattgaacgcgcgcagcagatcggcgatttcctcgccacggcattcgcccagtaccacccgatccggtctcatgcgcagggtcgccttgaccagctccggcagtcctacggctccggcgccttccacattcgcccctctcaccaccatcgacacatggttgccgcgtccgaggtcccccaattcccgaacctcctcaacggtgacgatacggtccaatgaatcgcattccgcaagcagcgctttcagcagcgtggttttgccgctgcccgtgccgccgctaatcagcactcgagcccggttcttcaccagattcctcagcaacgtcaaccagtccggcgggaacatcccagcatcacgcaatccggtcaatccgagcaaccgccgatccggaaaacgaatcgtcaccgccgcgccctgcgcgaccagtggcgcgatcaccgcgtgcacgcgaatcccgtcctcgctcgacgcgtccgcaatcgggcaggcgtcgtcaagacgccgtcccaattgcgcacacagccgcaccgcatattcacgcactattcgcggcgtgcgcaacggcataggcaaccggcactccgtcattcctccgcctcggtccgcccacacccttccctcgcaggtgatcgcgacatcggtgaccgttggatcgcgtgccagcgcatccaacggcccaaattcaatcatgggacatcacctcccaaccccgtctcgatggcaccgacgactgcatccaccgccttgcggctgctcttgccgatagcccggatgcccagcccctccagcacatcgccatgcagcccgcggtccggagccaccaccccggccagctcctcatgcagatactccgatgcctcgtgcgcgtcgaccacgccgccgcggcgcgacagtccgcggggcacgacaccgaccataatcgggcgcgactccccttgacgtatcatcatcgccctcgccgcccgagcacgcgccagaccgagcaccgtcagctcggccaataccacctggcggcactgtcgcagcatcggcagcgaatgcaacgcgctcggagccccgatatcgacgaccaccacatcattggcctgcgccagcgcctcaagtacggcagagaccgtccatggctcaggatccgaaccgttccaaggttgactggcgagcacccccacgcgctcccattgcggcaactcgccattcagcgccgcaccttccgttttcccgagtggtatatcgactgtttgaaatcgcaggcccggctcgttttcgatgcccagcagcacgtcgatgcctccggccgcgaaatcgcagtcgaccagtgcgcactgcaacttgcgctgggccaagcgccatgcgaccatcgccgcgaacacgctggttcccgctcccccggacgcggaagagaacaccactgtattacggcatcctgcatgcgtcagcgtgccgatcgactgattgccgtccacggatgagactgggctcgggcatacgactcgcggcatggtcatgggcttgcgcgcacgcatccgatggcttgcagcatccgagtcaagccgggaaacctgcgcagccggccttcgccaagcgtccggggaggcccggcgaggcggcatgggaacctgccgcggcgccgctgcacccggcggagcggcggcgccaatcttctgaactgtaacgttgtgtgtcatattccgattgaaacgaatagcgccacagcggcgcaacgtgaggcgacaatgtggtcgaaggcccgcgacttatccacatcacggcgtgttatccacagtttttgtggacagacgacacctagatgggcatattcgcgtgatatggaaccgtctccacttagcatccagtcgaaagcacccggcagcggagtcgggaggaatccgagccaacctctctgcaaccttcgcccgtgcgcatctcgccgaacgtcgcataccccgcgctcacgaacgcccatcgcgcctccgatcatctctgccggtcagtcggtcacggcaaacattgaccagaacccacccgcccgtcataaccaccggcgtgccacaccagaggaaaaacacacaaaaattgcattgtgtggcttttccgcaggcctcacaatgaaatgtgaaccctcacatcgcatggtgtggtacagcacaaatcatgagaaccgccatttttcaacaatcccagaagcaccccaatatcctccccggccacaccagccccaaaaccgcataaaatcacgtggtgtggtacagcccgccgccaactgccgtccgccaccaccatcgccaccgcaacacgggccgaaatcgccgcaatccgcgattcggcgaaaaatatcgtttcgaaggccaaagcccggtgattgcgagttcggcgccagaaaaggccgggccgaacgatcacgctgccccatcaacacaccggcaatgcacccgggtaaggcacacttttgaccacttaacccaatgattgcacacaggaagtcacgcggaacagcaggagccaacagtccgaaccccaacccgagccaagcccaccctcgccattagaccgccgcacatggaaaaacccgccggagcgggtttttcctgcaagtccatcttgagcagatcgctgcacaacctcatcgtcgtaacggtaagtctttccattgcccgttcaacgtaacagtccttcgtgaccatacactattgtgggcctgctcttaagttgtccttgcacttcataatctaggcgcaacaccgcgataccgcaactcacccaactacgttgtgcgattttttgcgcaagtgttcgatatcgctcaattatgacggaaaactgtcacctcatgttcctatcggacgggttcgttgttcacttgtgtgcggaaccgacgacccatcggcgtgtcgccgtaccatcacccgacaccccatccgtacgaaaatggtaaacaaccgctgaatttcttacacgccgcataggaaactgccatattctcgcataaagttatatacatggcacaaacatttgacgcaccttcaaaggctatcctgcgcagccaaatcgccgagcacatagccgagacagacaaacccgacaagcgcgagccgcaagccggcgaagagccgctgcccgcggatcgctatttcgaccgagaactcagctggctgaagttcaaccagcgagtcctcgaactcgccgaggacgaagaccagccgctgctggaacgctgcaatttcgccgcgatcttcgcctccaacctcgatgaattcttcatggtccgcgtcgccggcctcaagcgccgtatcgacaccggcatcgccgtcaccgcggccagcggcctgagcccccgccagcagctgcgtgccatcagcgagcaggcgcaccgcttgcagaacgagcacgcgcactacgtcaccgagaagctgctccccgccctcgctgacgagcacatcgtgctgctcagctgggaccggctcactaccaccgagcaggaacgtctctcgcgctactaccgccagcaggtcttccccgtactcacgccgctcgccgtcgaccccgcgcacccgttcccctacatttccggcaactcgctgaacctcgcggtgctggtggagaacccgaactccggcaaatcccacttcgcccgcgtgaagatccccggcaacatgccccgcctcgtccccgtcgacgacctgaccgacgaggagagccgcgaggagcgcttcgggttcatcacgatggagaacctcatcatcgcgcacctcgaatccctgttccccggcatgatcatcaaggaggcgcgctcgttccgcgtcacccgcaacgaggacatcgacgtcgaagaggatgacgccgagaacctgctcaacgcgatggagaaggagctgctgcgccgccgcttcggaccgccgatccgcctggagatctccgacgcgaccagcccgttcctctcccagctgctcgccgaccagctcggcgtcaacccggaagaggtctaccgcctgcccgcgccgctcgacttcaccgtactgttcgaactgcagtcgctcgaccgcccggacctcaagaaccgcccgttcatcccgaccacgaaccgtcagatcgccgaagtcgaatcgagccgcgcacaggacatcttcgccgcgatccgcgagcgcgacatcctgctgcaccacccctacgattcgttctccacgtcggtgcaggcgttcctcgcccaagcggccgccgacccgcgcgtgctggccatcaagcagacgctgtaccgcaccagctccaactcgccgatcatcgacgcgctgatcgacgcggcccacgccggcaagcaggtgctggcgctggtcgagatcaaggcgcgcttcgacgaggacgccaacatcgcctgggcccgcaagctcgaacgcgccggcgtgcacgtcgtctacggcatcgtcggcctcaagacccactgcaagctcatcgaagtcgtccgccaggagcaggacggcctcaagcgctactgccacgtgggcaccggcaactacaacccgaagaccgcccgcctgtacacggacctcggcctgctcacctgcgacccggtggtcggtcaggacctgacccgcctgttcaaccagctgagcggctacgcgccgaagtccagcttccaccgcctgctggtcgccccgcgcaccgtgcgtaccggcctgattcagcgcatccgccgcgaggaggacgccgccaaggccggcaaggaagcctggatcaaaatcaaggtcaactcgctcgtcgacgagaagaccatcgacgctctgtaccgcgccagccaggccggcgtcaagatcgacatcgtcgagcgcggcatctgcgcactcaagcccggcgtgcccggcatgtccgacaacatccgcgtgcgttcgatcctcggccggttcctggagcacagccgcatctacgccttctgcaactccgacggcccgcagatcggcgaaggccccatctccggcccggaagtgtggatcggctcggccgacctgatgcaccgcaacctcgaccgccgcgtcgaggcgctggtccgcgtcaccgcgcccgagcagatcgacgagctaattcgctatgtggacctgcagatgtccgactccacggcctcctggcacatgcagcccgacggcacgtacatccatcattcgcgcgacgacgaaggccgcccgctggtggacagccaggaatatctcatccgcaagcaccagcgccgcccgcgcaccaacaactgacatggcacccggccgggcgcccgataaggcatccggcacgagcctcgtgcaccgcatcttccgcaagacaagcggcgcacgaggtacagtaggtgcataagccgatggccgacccgcaagggtcggccatcgtcattacagacgagaaacaacgtagtcatgcagccggtgaggcataatggaagggtgagtggtgaggtgaaaatcgtagaagctgcaggcgcggtgctgtatcgccgcaatactgattttcaaggatggatgaagttctcggacgacgggcggcagacgtccgcggcatcccgactggccgacttcgatacgcttgaagtgtgcatcgtgcaccggccaaaatacgacgattggagctggccgaaaggcaagctggagctcaacgagacccaccgccatgcggcggtacgcgaggtcagcgaagagaccggagtgccggtcgcgctcggaccgttcctcggcgaaatcgaatacccgcttgccgaggaaggcaagaaaacccgccgttccaaggatcgaaccgtcgacacgaagcacattctcttctggatggcaaggccgatcgaccccgaggacgccgtgcggcgggccgacgcgttcggccccgtgcatcgcgctgacgtgggcgagatcgacagcgtcatgtgggtgagcgtgcagcgcgcgcggcgtatgctcacccattcgaccgaccgcgatattctcgcgttgttcgtcgaccgtgtggaggaaggcgcgctggacggcgacatgctgctgctggtgcgtcacggcaaggccgagccccgcaagcagtggacgggtaccgacgacaagcgtcccatcacgccgcgcggagcgtcgatggcgtattcgctcgaccgtgagctcgcctgctacaatcccactcggctggtcacctcgccgtggctgcgctgccagcagaccatacagatgctgtcatggcagaccggattaccgctgcatacggccgaaccgctcaccgaggacgcgttcgccgccgatccggaagcggcgtggcagtgcttccacaaggagctgaaaaatacgttgcagcgtcacagtgcgaccgcggtctgcatgcatcgtccggtcatcggcggtattttcgggcatctgcgcgaactgtgcgcgacgaaatcgctgatgaaacggctgattccgtcctcgccgtacatgccgaccggcaccgccatcgcgctgttcgtggtaccctgcggtgacaccgtttccatcattgacattcagaaggtcacgccacttgtctactagcatgcattttggttcgggctccgtcgttcccagccgcacgggattcacgccgaccggctcgccgcggccatcgcgccccgggcagatcgaccccggcctcatcgagggcattgccggaggcgccgatcccagcgtggtcagcgaaatgagtcacgcatcggcggccgctctgctcgaccgcgtgcatcactccgctgatccgcaggttgtggaacgggtgctgacgctggtcgaccacgaaggcgtggacatgatcgccgaactgtggagccggtcggaacccgactcgctgccgggcatcatgtggcggctgtacacgttgcgctcatggatgcggcgcgaccgcgatctgatctcgcggctgtggcggctcggcgaaccagtggcgaccgccgcgtcggccatcgcaggcgtcgaccaggcacccaccgaagcggacatcgcacatacggcagattcgattctcgcaggcgcgttcaccggcgatttcgccgtggctctggagagggcgagcgcgttcgtcgacgtggtggcgcagggattgcgcgtcgaagcgcggcacatggtgcggcaggccgaggccaaggccggctccgaaaccgcgaccgccgcagacctggccgaagcccatgtcatgcgctcccgcagcgccaagctgatgcacaccgccggcaatctcatcgccacgtccaaggatttccgccacggagcgcagctgtggcgtcgcggcaaactggactgagccggcgcaacacgcggacagcgtaacagggcaaacccggatatactgatatccgcgtcgggccatgcatagccccgggctccattttttgccgctgcgagcggcctttgcgccgacaggcgctttcgtggttcggcgcattctctttttctttctcaccccgttgaatccgcaacacgctgctgctgatgggacgagacgtacagcagacagcggaaaccgtaggcgatgtactgcagcacatcattcagccccgtcgcgctcatggagtcctcgacaccccattcactctacgcatcgccggtggccagcagaccgatcggcgacagctcgactatacggaactgggcatgtggcggaatttcacccactgcggcgtgctgtacgcgcatgtgccggaggtcgatccgctcgcgtcgccgcctgcgccacgggatgccgcaggccccacggcggagccagcaacggcggctgatcccgacatgtcggccgaagcggtgcgcgcccgcatcgaggccgcccgtatcaaggcggaaaacgaactcatcgactacatccgatcccacgcggacgccataggtttccccggcgagctgggagtcagccgcgccgtcaacggcatctgtctgcgagtgctcaccacacgcggtaatggcgccttcgacctgatcaaagacgtgtcggatttcgtcgttgcgtaaaatcgcgctctcaaaactcgcagatacagcatgaatatacgcaaaaagtgcttgtacctgcgagttttgagagcgcccctgacgctattgccgcaccaacggcggcatcggctgccacttcgggtcgtgcatcagcttgtgcgagtcccgccatcccttggcgatctgcaccagcccggtgcgcacgtgctcgcgatcgaccgcgaccaggcgaataacctctttcgccaccgtggcggccgttcccagggcgaacagcactggccggtagtcgccgtgcaccatgaagtaccgggccatgtacccgcggttgcgcaggatgtggtaccggttcatgtccgaggtggagttcagctgccgcaatccggcgatgtcccagttgctgatgtcgcgcgtgcgccgcatcaccacgtcgggcaccacaatcgagttggtgaccttgctggccagatacccgtacatcgtgtcgtcccagtagatgaagaaccgcgggtcggggagcccaatcttctccacgatgcgcctgcggaacagcccgccttcgaagcacagcgtgttcatcacgcggtacccggcggagccgaatgcggccggcgcgatcgggttcgggatgcccagcggcacgatgaagttgtactgccagtagaacggcccgccgtcgaaatcgagcttgccgccctggatcacgtcatggtcgcgaccccatttcgcgagcttctcgatgccgtcaggcagtacggcgacgtcgtcgtccatcacccagaaccattccgccccgagatcgtacgcgacttttactccgacggaaaacccaccggcaccgccaagattgtcggtttgcggagcgtacaccacacggctcgtgccacctttgcggtcggcgtccgtcgtcccccacagaccgtcggccttctcccggaattcgtcgaccatgtcctgcgtctcgtcggagtgttcgttgtcgacgatgacgatgcgccatggcgcgaccgtcagctgcgcgaatgaggccaggagttcctccagcaactgctggcgcttatatgtcaccacgatgatggcgagcttgtcgaacaccgcacgggcatcacaggtgtgctcgaccgtggcttccccagttttgtcgttcctgtaagtcatacctttcattgtgacaccgtttatgtgaaggaaagtgatagtcacaggattgccaccagacaacgccataatgtcatgccgacgtttccggccgtgcaactaccgttcagagagtatggaggtgggtcatgagggcggcaccgcccggcgcgtggtcagtcgccggagctgctgtcaccggcgctgccgtcgccgctgctcgacccgctgccgtcggacgagtccggggccggctcgccgggcgcctgcccgcgcgtgaccgtcaccgtgttctcggagccatccctccacataatccagtccacggccgtatggtcgtagtcgtccgcgtcatcgcccgacggggtcaacgtgtagctgccgaccgtctcgcccttctcgtcgacgatgatgttctcgtccgtggttttgacgtagaactgcttcagcagatagttggctccttcgaactcaccggagttcagcatcaggcgggcccaccgcccgccgtccagcacctcggtgaccttcaggtcgcgcgagaggataaacacacgcttgctgtcgctcgactcatcccactggaaatacagggaaccgtccgagaactggccgaagtccgtgaagttcacgtactggtcatccttcgtgttgatgttcagcaggtcggtgacttttttggtcttgcccgtgcctgcatccagaatcagcagcttgttgccgttatagctttcggagggattgagcacgtactgattcgcgccgaaccgatacaggccctgcaagtcgcatcggtaggtgtcgccgggcgagcagtagtccgaaggaatcttcacaatttccttgttgctgtcgatggaatacaggtggtatgcgctgtccttgaccacatatgtgtcgaacacgtggtaatcgtccacatcgacttcagtagtgttcaacgactggtatccgccgctgtccttgctgatgctcacgctgtccttgaacgtctgcaaggtctcggcctgcttcgcgccgccgctcaatcccatgatctgcttgtgaccgatttcgacctcacgctgatcgtcgttgacagtcctcttctccgtcgtcttccagcttttctcgatggcgacgcgattgttggattgcgcgagcacatcgaattcgtaatcctgctgcaggttgatcagattgtcttcctcggtgcgcagatcgatgcgatcggacaattcgccggatttcaaatcgacctgatgggcgaacaggtgcacggtttccggcgtggtgccgaccgccttggtcttgaccgcgtagatcacgaacacggacggattgggaccgtatgtggcggcgacgaccggatcggagtacatcttctccccggatttcagagccgagaagtagatcaccttcgattcgtccattgccggcgtccagacgccgaacgcatattgcccgtcatcggcggattggctggaactgccatagtcggaatcgctgctggagctcgcatcgccgttggcgcagggcattacgtcggaaaccactgcgccgccgtcccacccccagtcggaggtgtcgtagttgcagacgaagttggtcatggtgacttcgttgaccgcttttttgccttcgatctgcgtcggggattgcttttgcgttttcttcggcgttgcatcagtcgtgtcgctggtctgcacgggacccgcggccgcgttcttcctgccgtgaaggatgaggaatgcggcaactccgccgacgacgatcgccacgacgacgatggccgcgatgatggcgatgatgatcttgcgcttcttgcgttgcgcgggcgtaagtggtggcttcttgccgggttgggattgcgacccgggctgaccttggggtgcgctgccgccgttatccgcggggcccgctggctgcgggacaggcggcaacgtccccgtaccgggtactgtgttcggagcgaagccggacgcggctgtaccaggttgaggcatctgcgccccgctaccgggcgctgcggcggcaccgcttgcgaccggaatgccgcagtatgtgcagaacgccgatcccgctggaatttcattaccacatcgagcgcatctggccatcatcatcccctgtctcttcgttacgacaatcataaccaattcgagggattttgaaaggccgcgaagccctgcggccgggcgcgatgtcacgcggtctgggctatgatgaaggcgcaaccgaacgggagccgcaaggctgagaggaagcgacgcttcgaccgtcaacttgatgcgggtaatgccgccgtagggacgagttgtccagtcgcagcgcagcaacaatcggcatccgccaaccgatggcggacggttcccagccaaacgcaccgggcatcccggcatataacagaacaggcataacgaaaaaacgcatgattcgggtcatggaggggcgcaccacctcacagggtacggcttgctccagcgacccgtttttcatatcggcggatgccggcgcacccgatcggagatcgaccggcaacggccggcagtgcaatgtcgccgatatgggaatcacgccagcgaccgaggagggacacatgatcatcaacgggcagcaggaggacatcgccacgccgctcagcgtcgacgagctcatcgcgcgcaagggccttaacgcgggacgcgtggcggtcgaggtgaacggtgccatcgtgccgcgcgacaagcgcgcacagaccatgctgagcggcaccgacaccgtcgaaatcgtcacgttcgtgcagggcggctgagagcccggcaaacacgcggcaaggcatcggcacgggctcatgccgatgccggccagcgaaccgcactccgacccgaataccgcacgcatcaagcgtcatatacctcaaagaaaggtaccatcatgaccatcgcatcaaccacaccggccgcccaatcggacgacccggtgctcgacgaactcatcggcacggcgacgaacaccgcgctgctccccgaaccggacgcgcacgcctacgacgacatcgcgaccggcgacgccgacccgctggtgctcggcgggcacaagttcaccagccgcttcatcctcggctcggggcgctacgacctgaacctcatcaaggcgaccatagagaacgccggcacgcagatcgtgacgatggcgttgcgtcgctgccgcacgaccgagaacaacctgctcgactacatccccaagggcatcacgatgctgccgaacacgtccggcgcgcgtaacgcggaggaggccgtgcgcattgcgcgtctcgcccgcgaggtctgccagacggacttcgtcaaggtcgagatcgagcacgagacgaagtacctgctgcccgacaacgaggagacgattcgcgccaccgagatgctcgccaaggagggcttcgtggtgatgccgtacatgttccccgatccgatcgcggccaagcggcttgaggaggccggcgccgcctgcgtgatgccgctcggctcgcttatcggctccaacaagggactgcgcatgcgcgacttcatcgaggttatcatcgcgaacacgcacgtgccggtgatcatcgacgcgggcatcgggcgtcccagccaggccgccgaggccatggagatgggcgcggacgcggtgatggcgtacacggccatcgcgagcgccggcaacatcccgctgatggcccgcgcgttcaagcacgccatcgaatccggccgcgaggcatacctgtccggcctgggcacggtgacggagggtcacgccgtgccgtccagcccgacgaacgccgccgactacctgcactgagccacccgtactgagtcgcctactcacgtcgccgcccggcagcgtgcacccatacgtggggcacgatgccgggtgtaccttaatctcgcgatgacgcccagcccgcggcccgagcccccgcgatcacaggtcaacggccatcgccagctccaggtcgtcgtccagttcctcgacatcgaagtcgagcttcctgagcacgtcgtcattgggaacatcgccaaggggcgcatcatcaccgtcgccggggcccatgtcaccgggatcgtcatcagggcgcatcagcatcgattccacgacctcatcatattggtccggattgccgcggaacaacgccaaagcgcacccccgcgccaggcgctcgtccgggaaccgtgccaatacgatgttcgccaaggactcgcccaaatgtgccttcgcgttcatttcctcctcgctcagcttgtcgagacgtttctgcatgcggcgtgtgagacgctgtatgtccgcctcggacgtactgtaaagcgtgccgtccgtcgcgtagtcgtcatcaagcccccgtgagaattcatcgaatccgttcatgaacgcgattatcggcaatgacagcagaccgaaccggacgagcgtctccgtaagcagttccagctgctcgacgcctcggtcgaaccgcttgcggtctcgccgctcgaatccgaggataaggtcatgggccatcacgtcgcccatcagcgagtatgccagatcgttcaggaacgccacatcctgccatagtggttctcccggcacatcccgattgtgttccagcgcgagcatgcggtcatcgacatctattggttcatcgtcccacatcttctcgtatgcatcaatcagccggacgacatcgtacatgtatcgccgctcgcatttcagcagatccagcctatcctccatgtcgatgcgggcgcagctctcgcagtcgcacagcgactcgtcgcccacctcggcatatccgcgaacgccatctcgcttcgacgagcatccgcccgcgtcgcgatctgccgtcgcaatctctccgacagccggttcctcatcgtcatgacgactcatatactcactcatccactgattgccatgcagctcgtattccgcatcggcctgcgcccgccgctcgtgcagatagtcgaccacgcgccgataccgcatgtccggcgccgcaccgaagcgcaacacgtctccgtcctcgcgcagcatgcacatgccgatgccggggtacagcagcagcatccgggcgatgtcgaggctgcgccgctcatcggcaccccaattgagcagggtgtatgccgccagccggtgcatctgcgtcgaatgctcctccatggcgagcccgcgctgcttgcggttgccgaaccgcttcctgccgcgaggccgtcgcatcagttcctcgacggtcgtcatacgaatcagcgacggcatgtaatcggacgggtcgtcgcgaaacagagccagcgtggaatcgttcagcagctcgtacagccacaccgagatgccgtacttgcgcaccgtttcggagcagccgtgaagaaacctccggcactcgcccaccagccgcccattgaatgacatcgccgccgcgcacaggttcgtcgtccaactgccgcacgcgaacacgtcgcgcgccagcgcgtacaaccggtgatcccatggcgtgggcgtgccgtccctgtcatagtcttcgcacaccttgcgcatagtctccggagagacgagttcctcgaatcgccgctccaacttgttgatagcctgcagaaatccgatggtatccatcgagaatgatgtcgccatgatcgctccttttcgtatgcgccattgccgtcacggtccctccgcgtcctcgcgcataggcacaccatggcacacccaaggctcccgtcgccacccaccctcgaaaatctgtggataagtggataactcaccccttatccacagttgtccacattgccggcggaaccggccagcccggccatcagaccggtgaaaccatacgaaaatgccagaatggaacaccacgcgcataatcgacttccactatcatggctagcggaagtcgattacatgccgcaggccgtcacaccagatcaggcatcaaagggaagagacaacgaacgaaaacaaacgcaccgtgacgattctcataccctgttacaacgaggaggagtcgctgccgatgctgttcgcccggctcaccacgctctctgagaacgcccagctggcaccggacgatgacgatcgcatcgactatcgcttcctgttcgtggacgacgggtcgaaggattcgacccgcgacgaaatccgcgagttcgccagcaaccgtcatcctacgtaaggtgtccgtgcggacacgcacagctgtgcccgcgcggccgtccgtggctacatgaatttcttcagatccaccggacagctcaggccatccttgatgctgctgagcttgtccagcgcacctccattggaggagtcggtggagttcttgttctcgtcggcgggcttcgatgaggtcttgccggaggatttgccgccgtcggtgccgtcggtgccgttcgagctgccgtcaccgttcgcggaaccgtcgctgccagttcccgcccactggtcctccaccgcatccggcacatcagcgccgcacgtgtcggtgaccttgccgttggtgcccgtgtagatgcccttctcgttgataatcggcgtggtgacgacgtccagcgtcgacttcgccttctccgccgcccgcacggtgaacgcgatggtcaccgtctcacccggcttgatgccctgggtcagacgcaggttgatgaactggcggtcctccacggtgccattcgacaccatttcgccggattcgtaggcgagcgacgtgatcgcgccgccttcgggcgccatcaggaacagtcgcggctgcatcgtgcccttctccgtattgccggtaatgaacgccggcaatgacttcgcctgctcctcggtcatcgtgttcttcaaccgtaccgtcaccgtgtattcgtcgccgaggccggcgttcgcgatggtcatggggttggtggctcgggcgggcgcatccacttcgtcgctgatgcggtacgagttcgcggcgaaatcgctgccgcacgtcttcttgacggtgatgctcggctcaagataccagctgagcttgctgggcttcgcctcggtcacgtagacgccggccttcggctgttccacactgccgggaatcatgcccgcgacgttcgcgtcgaagaccttggtctggacgagcgccgccagctcctcctcctgcgccatccacagcttgaaatggccgttcgcggacgtctgccgcagcgccttgagcatcggcgacagcgtcgacgtgcccacgcccgagaacacgtgggtcatgatcgtcttcgacgccttgttggtgtaggcgttctgctccttgtagatcgggtggtccacgtacagctcgttgaggaagaacttgaccgtgttcgtgccgtccagtaccttgccgtcgctgagcttgaccgatcccgtcgcaccgatcagcgactgcaggaacacggggtcaagcgcgaacacaccggcgatctcctggttctcgttgcccggctgcgcgagccacatgttcttcaatgtgaccgcagcccgctggaagttcgggttgacggtggtcgtctgtgggtatttccacacctggtcgccgaacaccgcggcttccttgacgttctcggcatcgtacggctgcgttccgtaggtgatgtcggtggtggcgatgaagtcgccgatcgtgaccttgccgtggtcggcggtcaccggcgcgatgttgccgaccatgccgccgccggaccgcagctcggccggattgtagatcgcgaccaggtacgtgcgctcaccgttctcgcccagcagctgtggcagcaggttgatcagctcgtcgtattcgttgagcatcttgtccacggatttcaggccggagacgccggtcttcaccatggaggcgatgctcgagctcttcggaggcgccagcttctccagccgccgcgtctcgactttgatgtcggctcgggcctgcttgacgatgcccggcatggccgtcaccgcgctcaggtcgacggatttgtctttcatggagaagccggacagctgcttgctcaggtccatcaaatcggtgaacggcccgtccaccaggtttcccatggcgtccagcatcgtgcgcgcggcggtgatgtcgttcccgtacgccgtatggtcgcgcaggaacgtccactgcgacttgtccagttcgtcgcgcagcgcccgcgtggacgtcaccatctcacgtgcggacgtgccgatgttacctccgccaccgcagccgagcgcggtgttggcgaggttttcggaagcggagatgaagcggttcgcctccgtgtacagtttgagcgcggagattccgtagataccgacgaccgacaacacggctcctagtagcacgaacaccacatacagcacgatgcgccgcggacgcagcgcttgagacaggaattgatgtccttttcgtccgatgtgctggggggatcggcgcatgggttaacctcgtttgcttcgtgttacattccgttttgtcgcgtccgtcgttccacgcgacgaccgttatcgttccgtcgggttcgatggcctgccgtcacaccgtcttttcgggcggaccggctctcgacgctacgtaatacaacctcagatgataccgtgcgatgcttaccgcacgctaagtcttctttctgaaccgttgtatttcgacgtttttttcaccattgcccgggaccggaaggatggcccggcacaacacccgcgaccttgtcagactgctttcagacttcattgaggggtataacagtatggagcaagataacatacacatagcgcgaccatagtgttgcctacgggatgccgtgctttacggggcctttcggggttcttcgggtggcgtcccggccactgtcacgaaaacgcgggcgcacggttgccatgatcgcagcccccgctgggaagaactggagaagtacacgcatgttcgttctcaagaacgcatggtcatccatagtccgccgcaaatggcgcacgctgttgaccatgttcatcgccatcatcgtcacattcgggacattgttcggtttctccgtcctgcacgccgatgaatcggccaccgatggctacaacccccagctggtcagcgccgtcatccgcccggatgcgaagaccaaggcaacctacaacggcgccgattcttcctatacgaagaactacctggcgttcgacgcatacgacaactacgcgtctgcgctgcaggccgccggcctgacgtacagctatgcgctcaccatcaccgtgccggtgcggcagagcggcgacgtcaaggccatcgccggcaccgacgaccagagcgccgacaagaccggcggcgagatgctgtaccgcagcttctcttcgctggaggccgcgcatgagaacgagctcggccggtacaagatcgtcaagggcaagcaactggactactcgagccagtcgaagacaggcgtgctgatttcacaggcgttcgcgaagaagaacggcctggacgtaggcgacaagttcaccgtcgcgttcccgaacgacgcgaagaagaccatcgagcagaccgtccgcggcatttacgagtacacggagccggccgccgcggggcagggttcggacgccaagctcgccaaggacaaccgcgacaacgtcatctacaccgcgtactacaccttcgcgatggacggcctgtatgcggccgacggcaaaggctggctgattcccgacctgaacatctcattcctgctcgacagcatgtcgacctatcggaagttcgagaaggtcatcaagaaggcaaagctgcccgcgaaccatgagctcacctcgccgacgctaatcgagcacgagaagcagatcgcgccgctgcgctccctggcgagctcgatgaagcctatgctcgccgccctctggattgtgggcgcggtactgttgctgctttcgtggggatcgagcctgctggtcggccgccggcgtgaaatcggcaaccagatcgtcatcggcgtctcgcgtgggcgtatcgcctggcagttcatgctggagacgctgttgctgaaccttgtcggattcgccgtaggcatggtcgtcggcgcgttcgcggtcaagccgctggccacgaagctcgccgacggcaatgcggtcagtgtgccgggcaacctgatctggactgtcatctggagcggtctcggcacgattgtggtcctgatggtgatcgccatgatccgtgtgctgctgttccgtgtcaggacgctgtttgcggcccgttcctcgaatgaggtcgaggtcgtggatggcggcgggacggacgacaccgcaacaagcgacaacgcagcgaacgacagtgatacggcagacgccgacgatacggcggaatcggcacaggagcaggcatgaacgacacgaacacgaataaggcggacgacatgaacgaggacgacgtcacactgaccggtcccgaaggcgagaacacggcggtcgaatcagacgcggcagccgacgccacggccgacacggcaaccgaatccccggatgccgccggagcgagcgattcgacgacggtaccggacagcgtgcagttctccatcgtcttcgacgacgacggtgacgactccgacgccatcgtgatcgacgctgccgacgcggaaatcgacactaccgcggaagccgatacgacggtcgcgacggatggctccgccgaggaggcaccggccgacgacgagaatcccggagatgatacgcaggatgccgccgcgcaggagccggccagcgccgacaacaccgccgataacaccagtgccgataccggcgatgctgataccggcaccacggcggcggacaccgccgacgagaacttggatgtggcagcggccaacgccagcaaggtcaacgaaacactcaagctgagcaccgggggcaagacggccggtgatggccagaagaagaccagggccggcagggtcaccgtggcatcggccagcgtcgaccctgcaatgcgcctgtcatcgcgcatcgacaaggagctcaagcgcagcaaggcggacagcatccgtctcaagtcctacccgacgttctcgatgaacaaggtcacagtgaccgacaagaagtccggccgtcacgtgctcgaccgcatgacccaggcgttctatgccgggcatgtgtactcggtgctgctgcccgacaacgaccgcgtgctgcacgagaccctgatgggcgtgatgagcggcatcatccggccgcatgacggcaatgtgatgaacaaaagcgcgaacctgctggagcttgagcccggcgaagtccgtggacatcgactgggactggtgccgcagcagtatgcggtacgagacgacatgagcgccgaacgcaacctggtgtatgcgatggatgcctccgggcgcacgttcctcaagccgaagccggtgatcgcacgcgagctgctgcacaaggtccatttcgatgtggataccccgaacgctccggttggcaagctggacgtggtggagcagcgtcgcgtggcgatcgcgcgcgccatcgcctgcgaggccgaggtgctgatcgccgacgagcccacgggcgggctgaacgatgacgacagcgtggagatcctgcagctgctcacgtcgctcacccacggcgaccccaagcgttgcgtgatcatcctcaccgaatcagaagccgttgccaacatagccgaaaccatcatcaagctataaacggcctcatctgatacgccctcgctgggtgggcagtccaccgggctgtccacccagcgagggcgtattgattccacctagatcatgcgcatgtggaacctcgcggccagggccggcacgtcggggacgccgtactggtcgaccagatccagccagcgctgcttgttcgcctccccatagcgctccgcacgcttggcgtaggcttgcgcggtcaggaacttcggcggtatcgacttgctgttgtatttgtcggcgaccatcacgatttcctgttccagattgaccggcatgtaatcgaccggaggcagcggcaggttctgcgcgatgaccatctgctgggtcaggccgaccccagtatgattgcgcgcgaactgggcgatggactcgtccacgccctgctccagcaagtactcgtagccgagcaggccatgcaggatgtaacgtttcccgtcgaattgcagcggttcgccatcactgccgtcatgcttgagcacgcgatacgtgccgatgtcgtgcagcaggccgccgatcgtcgccagatgctcgtcgatcaggcgtttcggcacacggccaccggtgatgccgtctgacggcaggtcggcttgttcagctgccccggcggaatcgtcaagcgcgttgccgctgccctggcccagcttgttggtgaacagcgcgttctgatggcgggcgagctggcgggcgatggtcgccacgacaacgcaatgcgtgtgcaccaggtcataggcggcctgggaaggggcgattttcttgtgcagctcgtcaatctggtcgagtgtggggatataaccggtcatacggctcattgtagccatcgcgacacgccgataacatcgcacaatcgcaaggtgcatttccgcagatcagccattttccggccttcatcataaacagcgatgtcgattgtgctgcgcaatccgggcgtgtcgcgccggcgaggaggaaaagaggagagcgttgcgagcaagttacagatgccgggtgccatcaatcgcccgataaacgcctctcagatggagcgcacgtggtattcgccggtacggttggacgccacgatcatctgatcgttcttcagcaccttccagccaccggactcgttctgctcgaagccggaactcgccacgaccacaccggacggcttgccgtcacggtcctgcacgtcacggtacctcatcacacggtaatcgtgagccttctcgcccttgccatactcgtcgtaaatctcgacgatgcgcggcgacgtcttctcgcggccggcggcgcacaaagccacgagctggtcctggctttggatcatgcagttgtagctggacttggggtacgcctgacgcagctggcgtaccgcctgcgccacggcctcgtccagcgcgaagccgaacgcgatgtattcgaggatgaccgagaagaagatcgcggagtcggaacggccgccggtcgacaggaacgcaccctgattgatcgggtacgcacggttgagcacgatgttgatgccgcggtcgtcggagatgtcgccgttgtggatgaagctcagcccgttcgcgaagaacggctgctggttctccagaatcagcggcaggttggagctggcgagacgcaggtgccacaggccaccgcgtgcggggtcgtccgcaaagtcacggaaaatcgggtcatggcgggcggccagtgtgctcttgtacagtttcgtgccggtctcgggcttgcgtacctcgccggcggcaaacggcagctcagtggggttcgacagcaacgcgacaccccaaccgtcattgtgaatctcgctgagatcacggaaatccgtcacctcgtgcatgcccaggacgtcgttgaggctcaggttgaatcccgatgtcgcgtatcccagtaatctgcacatgcttggtactgtatcgtgccgcggcggctgacaagcgggcgtggctataggagttccttatagcgtgcgcacggccgcgatgcgcatgcggtccggcacccggcagacacatgccgatacgaccaatacggccacacaaacggccgattgacaggcaagcgtcatcatcaggggaaactgccagaagaacaagcgtccacctgcccgctcgccaatcgcacaacagacgaacaggtatgaggcaggtgccgccgcgccaactctcagtccgcacaggcggccacatatcaccccgaagcagccaagtccgcccacagatagcgcctgcgcgaccccggccgtgccatataccggtatcatcaccgcacccagtgccatcattcccgcaatcaacaccagcaacgccgcacgatccatcagccacgtattcctgacggcagccacatcagccgcagacatgccaggcagcgaccacgcaatcatcgtcgcaggcacaagcgccgccaacgtcgcaagaggcagactcacgccggaaccgaccagcgcaggcaatccaaccgtcatggacgccaatggcagcgtaacaagctgcgcggccaaacacagtatcgtcagcagtgccatcctcgccgtcttcatgcaagccggcagcattcatcatccataattcagcgacctgataatcacgtgcctgcgtgtccaatatcttgcatccgttctgtgtggtgtcatacgtcagcagaccggacagcaggtacgaggcaatctcatcgccggacaactgttcactgtcttccgcgctgaacagccatgcagtatgatctgccggggattcggacaacttggcaggcgtcacatttccatttcgaccaagtttcccggacaagtcggcagccggctgaccggccaaacgcagaccgtgatgccatctcgccggtcacagacagtagaggtcgtccttgcgataaccggatatgcgccgaacggcagtaccagcgggacgactaccgcgacggtggcgcatagagcgactattgcgcagacggaacagccggcaacggtcctgtcatggctgcgccatccgacgaccatcgcccgtactgaggcggttgctggcgcaaatacgcggcacccaggccgtaacgcatgggcggtttgcctccgcagtccatcagtccatcaggagcgcacgcgagccggcagtgcggcccgtgtgcgtctactgcttagcgagtttcgccgaatcgtcgaccttcacggcatcatttttcgtcgcgtcgaccttcgcgcctcccttggcatctgcggctgcagacttcgcagcgccgtccttcgcggcggtggccttctgcgccgagcccgcaggcttcgtcttgcttccgtccctcgccgcggacgcagccttcgtgctgcccgagccaccgttcttcgcggtcggtttcgcagccggccgttcttccggtttgctgacggtcacgatatcgttgacgcgcggcgtgcgcgaacgcaacgcgacgcgcttcagacgcggcggtcggcgagtggagatgaacagcggctgaacctcgaccaacgggttgaacggcgccaggccgaaccatttgatcggggagccggcgacgtgacgaatcgcgtacttggcctgcaacgacatcgcgcctcgcgtggagatcttggattccggcatcaggtccttgtgaatcagcacgtaacggatggtgccgatctccgggtcggcgtccaccttcgggtagacggacttctgctgcggcaggtcaccggaatccgacaggtcgtgcatgatctggtgcaggtacaccggaatagactgcgacaccttgaatcccagacggatacgcactcggaacaggtagctcgtgccgaaattctgcacggagtactcgcgcgtgaacggttcgtcggtagtctgcaccgacaccgcccaccacgcacgggcgcgcttgggatgatccgcgaagatcgagaagaagatgtccgtatccagtcgtcgcatatccgaatcgctggtcagatacacgatgttgtcggcgaaatacgggatgcggaagtcgccgtgcaggcggtcaagcgccggcaggaagtccttcggcatcatgtggcggcgctgcgcgcgttccagacgcgtgccctcgttccacgtgtacatgatgaacaggatcgccaacgtcagcagcatcgtgaaccagccgccgtgcaggaacttcgccatcgacgcgatgaagaacatcagctggatggcgaggaacacgatggtgaacacgaccgccagcacccgcttgcggtcgtaccacatgtacaccgccagcaggatcgtggtagtgatcatcgtgatcgtcagcgcaaggccgtaagccgccgaaatatgctcggaatcccggaatatgcccagcacgatgagcgtggccacgcacagtacccagttgatgacgggaatgtacagctggccgcgggtgcgcgccggataccgcacctgaagatgaggcatccaattgaggccggtcgcctctgacaccatcgtgaacgcgccggtgatcagcgcctgcgaggcgatgatgccggccgtgaccgacaggatgacggccacatagcgcacgttcggatccatcatctggaagaacgggttcagtccctccatgtgctggtactcgggattgttctggttcttgaggatccacgcgccctgaccgaagtagttgaacaccagggcgaccttgatgaacggccacgtgaagtagatgttgccgcgtcccacgtgtcccatgtcggagtacagcgcctcggcgccggtggtcgacaggaacacggtgcccatgacggcgatgccggccgcattgtgcgggctgaacaggaatttcacgccgtacacggggttgagcgccgcgagcacggaccaatcgccggagaggttcaccgcgccgaccacggcgaggaacgtgaaccacaccagcaccacggagccgaacacgcggccgatgctttcggtgccgcgcgattgcacggagaacagcacgacgatgatgaccacggtgatcatcagcgtcaggttgccgttttccttgaacagcgcctccaatggcggcagcgtcttcagaccttcgaccgcggagctgatcgacacggccggggtgagcacggaatcggcgaggaacgccgcgccgccgagcatggcggggatggcgagccatgcgccatgcctgcgaatcagcgaatatagggcgaagatgccgccttcgcccttgttgtcgatacgcatggcgatgagcacgtatttgacggtggtgatcagcgttatcgaccagaacaccagcgacagcatgccgagcacggcctcacggtcggtgttggcgatgccgccctggccggaaaggaacgtctgcgcggtgtacaggggcgatgttccgatgtcgccgtagaccacgccgagcgcgacgatggccatgccgagcgagatcttgttggggccggactgcaatctgcgccaccagcggccgatcgcgcccttgcttgcggtcttggcgagtttttccgcttccttggtttctgccgcctgctgctttgcaagctcttcgcgctcctctttcgtcagtgtgcgacgggagactttcgggacgttggtgaacgtgtcggcacgtaacaacgtttcatcgggcttttgagccatgatgcttcctccatcgacggggataatccgcacatgatatccgcatattctaggtacagctactaacggaaaccttggtatttcaaattcaagcggtcagtatatgccccttttcggttttttccaacttggggaggacgccgggcgcccttgccgcccctcgtcacaccccgtataccgtgcgtgtcgtgcgccgcgtcgcacgcgcgacttcggcgacgggcaggtcgaacacgtcggcgagcgccgtcagcgtgtacgggatcatgtacggcgcgttggtgcgcccgcggtatggcatcggcgtaagatacggcgcgtccgtctcgaccatgatgtggtccagtccgatcagccgggctgattcgcggataccgtcgttgcccttgtagctgaccgtgccggagaagctcagataccagccgttgtcgcgcgcgatctcgcccatttcggcgccgccggagtagctgtggaacacggttcgctctgggctgccgtctgcgagcagcgtctcgatgacctcccggtgcgagtcgcggtcgtggatctgcatgggcaggttcagctccttggcgagcgcgatatgctcgcggaaggcgtctcgctgcagttccttcgcgccttccccggtgcgaaacaggtccatgccggtctcgccgatggcgaccacctgatgcgggtatgcgagggccaggcgatgcacttcggcgagtgcgtcgtcgaagctcacgtcatggtggggcttgtatttcagcgacagaccgtccggtccggggacgccgcggtgaccgtggagcacggcttcattggggtggattgcgatggcggcatgaacggagtcgggatggtcgacggccatctggatggcggtcatgaggttcggcagctcgcacccgcagtcgatgatgccggtgacgccgactgccgcggcttgggcgagcagctgctccacgtcgtacaccggtacttccggctgtcctttttcgacggcttcgtggctcatggcccgcgcaaacggaatgacggatgccacatgcgtatggttgtcgatgacgtgcgcgtcgtcgggcagcggcgacggcgcgggcgcccagctgcggtcacgatgatgatgcttgctcatgtctcaccagtgtagcgagcggcacggcattgctgcgcggccgttcatgagtctcgcctcgccggctaccgccagcagctctcgtagggcagaccggtcagtcgttccaccacatgacgggtttcgggcgtgacgtcgaccttgtcgccgccgttgcgcaggcgggtgatctctgtcaatacgatgccgtccgtacgcttgttgatggcgagatgggcggacacaatccagcagatgaccatcgcgacggcaagacggtaaaccagcccagcagcacggctcccaatccaatgcccgccaccgtcgtctgccatgcgcgcgtcgcgtcgaagccgaccgcgcccagcaccaggccggcggcaatcgtcgctattcccgagcccagctgacggaacgatgcctgaatgccggagaacgtggcggaacggtaccggcgagtcacgatctggtcgatgtccgcgatgtacgggaacaccgcccaccacggttccggcagcgtgccgaccagcatccacgccgcgaacagccaggccgtaccaagccagccgatgaaattgatcgcgtacagccgtttcgggcctatcttggtcatcgcccagccgaacaccggcatcagcgacgcgaacgccgccgtatggttccagtcgtgcaccacgaagaacacgaacgtctggccgaacacgtccatcgtcacctgcaccagaaggtagatggccagatgcttgcggagctccttgacgcgcagcgtgctcgcatactcgcgcaacaccagccgtgcacgccgcagccagcccaccatgccgacgtgcccgtcacgcttctcgccccacgcgtgcgcgccgaatccggcagtctcaggcgtcatctcccaggtacaccgccagcaggcgaacacgtatatgccgaacggcatctccggaatccacaggaacacccccagcaggatcatcggcgatatcatcatcagcagcagatggcgtacggccacctgccccagctgggcgcgcggaatgcggatcgaggtgatcggcggcgtgaccaccggggcgatcagcgtgttgtcgaatccgatcaccgacacgtcaccgggcacgttcacgccgtcggcggtgaaccgcagcacgatgcccaccgcgatcagatcgttgtaggtgatgatggcggtggtgtcccctccctccaatgcgagcgcggcctgatagccgccctcgactgtggggtgcaccgggcctatctgattgaccttgaatcccatgcggttcccgatgtcatgcaccgcggccacctcgactgattggcccatgacgcggccgggccggcgacgtacgtgaccgcgagcgtttcagcaggctcagcgcgcacggtgccgatgcgcggatcgggcacaacgctggccacgccttcgagaggacggttcagcacgaccagcggcacgcgcttcgcatagtcgcggatgaaactgatgccgggcgcgtcggtggacaggatgacgccgttcaccttgtcggcgagatggtcgagcatctgctgtgtgcgttgcccggacgaccccgtttcgatgacgctcaccgcgctgtccgattccatggccgtgacctgcgcccctttgaggatctgcgacgagacgccgtcggcgtgtccttgaccaccagcgcgatgatgctgccggggaggccccgaacggggagaacggaggcggtgcgctcgcactgccgaccggcacagacgaccgcgaggccaaggccgcctacacgttcgcgcacggcgacggcgtgaaggggaatcttgcgcaggagggcattcctccgctgaaatcgacgctcggcgacccgcggcccagaccgatgatttcttcggagggcagaagccccacgccgtcatcgcccaggcgtccaaggacgtgcgcaccgacttcacgtatctgtcgtacacggcgtacgcgaactcgatcgccgtggattccatcggccagtcataccacggcaaactcaccttgcacgaggccctgcagcagtggggcgaatcgctcaagaaatatggagaagagtaaggcttcaccgtacggtaggccgggtgccgacccgaacaatgaaaggaacatcatgcaactgttgtgatcgtgccgcacgcacgatcgaaatcccttcataatccgccgtgcgcggcagtccgacatcccacccctgatgcgacacgcccggattgcttcgcacaattgaagcacggcattccggagaatggcggaatgccgcgaccctgtgaacgcagatagacgattgtgctacgcaatccgggcgtgtcgcgtcagggggttggatgaaaggccctcacgctccggtccgataggcgcaaccacacaccggaaaagaagaacccggcggggaagccgccgggtgagagaagagagagaagaaggggttcaattatggggtttcaacaacctcgccaacgttgtaacaaccgctgacatgttctatataaccgcatcatgcttggaggaatgatgcacgttcctcggaattatctgtgagatgtgtgcccgacttgtgagcatgtagtcacatcccggcacaatgtacggaaaaccggccaataggcaaggaacatggccgttcttcaccggtaacaaccctccgtcactttgcggcgggctgagcaaacggcagagctgtttgtagacgaaggcgatccgacaggcgagcaagtgggctgcggccgaaggccgtccccaattgcagggcccgaatggctgtcgcgtagcgactgggggtggtcaccggtcgtcgcaatcatcctctgcggacccacccgcatccacatcctccccaactaccgcagccgggttcgatggcagcagcgaccacgcatacgacacctgatactcataatcgctgccgcgccgatgctcgctcagccgcaggtattcattgatacgctgctgcacgtccatgagctcgtcacgggtcagcagcagcgtcccggtggtcatcggcgtgaaggggaattgccgacgtctctcagcgaggggtatggccgcgccagcttccatggcaccgttgatgcgcatgcgcagcgccttgagcaccccgtccatgaccctcatgcgcatggcggagtcacgttgctcgctaacggccatgctgaaggattccgcggcgggcgcgaacgactgtttggcaccaaagggtgccacatcggtcaggtcgacttgctcgccggccgtgaaaccggtaccggtggcggccgacgcagccggtacttgcatgatgccggtcatcgcaacacatgcgatagccgccaaagcgcggcgtcacttccttgtatgactgtcagtcgagcatgatatacgaaaaatatttcctattttctaccgttgctcacgcatcggacgaaaaatccccctgacattcatatgtcagggggattacaacaaagcctcaacagtcaacggcccttgtcagcgcctagatttcactgcttgagttcggcttgggccgcggcgaaccgctcagcctcggccttcttgcgggcggcgagctcggtgtcgaagcgggtgagctcctcggccacagcctcaggcggaattttcgcgaaaatcggatgcggcttcggcaccggagtgccggccaccagacgctcgctctcccacgggtgcacagtctcaccgagcttgtagtcgccggtgatgatcgggtacgtgaagcccggcttgtcgaggtcttcgacctcttcaaggcgcggcagcggcgagaatacgcctgagccgcccagcgcctcgtagaccttctgcgacgcgtgcggcaggaacggtgccagaaggtggttcgcgtcgtacaccgcctgcgctgccacatgcagcaccgtgcccagacgagcctcgtcgtccttgatcttccacggctcctcggcggagatgtacttgttgatgtcgccgaccacgcgcatcgcggcgaccagcgcgttcttctggtgatgcttctcgatcagcgcgccgatctcgtcgaacgcgtccgaggtctccttgagcagcgcacggtcctcgttggtcatcgagtcctcgtcgagcgccgggatctcgccgaagttcttgttgatcaggttggcgacgcgattgaccagattgccccagctcgcggccagctcctcgttgttgtggcgtacgaactcggcccacgtgaagtcggcgtcggaggtctccggtccggcgatcgagatgtagtagcgcacagcgtccacggggtagcgagcgaggatgtccttgacgtagatgacgatgccgcgcgacgagctgaacttcttgccctccatcgtcatgaactcgctggccaccacctgctcaggcaggttcagcgggccgagttcaccggtctctccgcccttggaacccttgccgttgtaggcaagcatctcggagggccagatctgggagtggaaggtgatgttgtccttgcccatgaagtagtaggccgggcagctcgggtcgttccaccactcgcgccacttctccgggtcgccttggcggcgggcccattcgatggaggccgacaggtagccgatcaccgcgtcgaaccacacgtacaacttcttgttcggattgtcgatccatcccgccaccggtacggggatgccccagtcgatgtcgcgcgtgatggcgcggggcttgacttccttgaacaggccgatggagaagttgatgacgttggtgcgccagcccttgcgggtcttgagccacgcgaggttcgcctcggcgagcgccggcaggtcgaggaagaagtgttcggtctcctcgaagcgcggggtttcgccgttgatcttggagacggggttgatcagctcgtcggggtcgagctcgttgccgcaggcgtcgcactggtcgccgcgggcgccgtcggcgtggcagatcgggcattcgccctcgatgtagcggtccggcagcgtgcgtccggtggacggcgagatcgcgaccttctgcgtgcccttatagatgtatccgttctgcaggcactgcttgaacagctcctgcaccacatgctcatggttgccggtggtggtgcgggtgaacaggtcgtagctcaggccgaggtcgcacaggtccttggcgatcacgcggttgtagcggttcgcgagctcctgggcggtcagtccctccttctccgcctcgacgagaatcggggtgccgtgctcgtcggtgccggacaccatcagcacgtcgttgcccttcatacgctcatatcgggcgtagacgtccgagggcacgccgaaaccggcgacatgcccgatgtgacgggggccgttcgcgtacggccaagcgacatttaccaaaacatgactcataaatcccgattatccggctcagcggggacaccgcggcgtatccacagcattatccacaatgcggcgtcgcggaacgtgagttatgcacatatccacagatttcgccgggtcggtggcggaccgccgcatcgtatggttatggtcggcgtatgaacagaatactgccttcggatatcagatatggagtcgcgccggcgcccgaccagacggatgtcgctgaagcggcaaaagtcggcaagccgcagcccaacgcgacacagcccgacacagggccgcccagcgcaacgcgacccactgcggcggcgccaagcaagactcagcccggcgcaacgcggcccggcacggagtcagccggcacaatcagccacagcgacaacgccgtcgcaatcgtttccgacctcatcgcgcgcggcaccatgccgcgtatcgacaccacgccactgctcacccacaaggaccttcccggtccgctcagcatggctcggctgacgcatttcggcaccctgcactcgctcgaccaaaccaacgcatacagcgccgagcacgccgacaccctgtacggccgcgcgatgatcgcgctgaaactcatcccgttcgggacgatcgcatgcgcgctcaccgccgcgtgggtatggctcggcggcacgttcccgcgcacggtcgatgtcatatccagctcccattaccgggcggattcgcacgggcggaagattcgcgtcttcaaccgcaagacggctcccgagcacgtcatacaggtcgggaacctgcgcatcaccacgccgatgcgcacagcctgcgacatcgcgctgctgacgccgggagagctgaacgagcacgacgcgtgcgacgtgctgtgcgccttgttcgaggagtatcaggtcagtcttgcgcagtgcatgcagacgctcgatgacaaccatttctggccgaacacccaaccggccagggaactgttcacatcgatgaagcatttcttctaattgcaagcggtcgcggggccgcatcggcctcccgtccgactcaaccatcgacacggctcaccgccacgacacatcaacacgacgcatcgacacgacgaaaggagagccacatgcgaatgccatcacaggagaagacattgcagcgattgcagaatcccgcggagacgctgtgcgagcgtccccgcgcggggacggccaggcgacggcttcgacacagtcaagccagacgagccaaacgcaagagcattcccggcagacggatgcatgctctgcaacggcgtgaacaggcgacggcgtcacggcggtcaacgcgggcggctcctccccctccgccgctcagactctccccgctgctggcgtgcgatcccgcgactgcgccggaagtgctctggttcatcgccgagcatgagccggaactgcggcgctggctggtcgccaatcccagcgcggacgccgcacttctggaatacgtcgcgcaggcgggcggccccggcgtcaaccgcgccctgaccatcctgctcgacggtctgccggcggcataagtcaggatttcattgccagaacggccgtatacacctgcttgcggttcggcaacgagccatccggcagcggatgttcggcgaccacctgcgcgatcgcgtctttgatgcgcacgccatcctccagggcacggtcgatggccagcacggccagatcgtcgatgctcaacgtcgccggcgcggccgcctccgcctcctcatccgacgcgccgccaatcaccagcaccatctcgccgcgcggcggattgtcaacgacgccttggcgtatcgtgccgaccatgccgcgacgaatctcctcataatccttcgtcagctcgcggcacaacgccatcgcgcggttcgggccgaacgcatcgagcaggtcatccatcgaatccgcgatgcgatggggcgtctcgtagaacacgatcgtgcggcgctcggactgcagcatgcgcagatgctgcacgcgttcggagtgcttgcgcggcaggaacccctcataacagaaccggtcggtcggcaggccggagagcgcgagcgcgtcgagcacggcgctcggtccgggcgcgcacgtgaccggcagcccacgctcgatggcccggcgcacgatcgccagtccgggatcgttgatggtcggcatgcccgcgtcggataccaccagcacggtggcgccggtctccacacggtcgagcagcccgtcggccttggctcgctcgttgtggtcgtgataggcgatgaccgtgccgttcacgtgcacgccgagtcggttcgcgaggtcatacagtcgccgcgtgtcctcggccgcgacgatgtcggcgtccgccagcagcgccttcaatcggtcggaggcgtcgcccacattgccgatcggcgtggcggcgagcacaacggtgccgctcggcaccatgaccgtccgcggggcggccttcggctcggtggcttccggtacagtggcgtccggtacagtggcgtccggcgaggcgccctccggcacgacttgcgaatcatcttgcacagtatccatggttcccagtatcccgcacgccaagtacctgacgaccacccgttgcgtccctaagtgcgcgccgaaacgacaagtgcgcgaacataagaacgcaaatgaccctgtttgcgtacctaagtgcgcacggtcgtcgtttcagcgcgcacttaagaacgcaaaaccgcctatccgcaccgctatataccgcgtctcccctgttacacccccgctggtatggttcttagagttttcttaatggaattacaccattgatagtgacgggaattttcatgggtttcgttcatttcatcgtcaatttgctgaaggaccctcgcggcgcaatcgccagctggattgccatgggcaccgcacctgcgctcggcttcatctttctcatcgtattcattgagacgggcgtggtgttcttcccgttcctccccggcgactcgctgctgttcgcagccggcttcttcgccgcgcagggcgacagcgggctgccgttgatggcactgctgcccatagtgtggattgctccgatcctgggcgatcagagcaactacttcatcggacacttcttcggacgccgaatcatcgcgtcaggcaaggtgaaggccatgacgccggaacggctggcgaaaaccgagaagatgatcgagaaatgggggccactggcggtgttcctcgggcgtttcttcccattcatccgcacgttcatgccgttcatctccggtatttccggcatgcgctggagccggttcaccccgttctcggtgctgggcggcctgtgctggtccacgctgttcacactgctgggattcttcttcggcaacatccccgtcgtgcagaagcatttcgaattggtcatcgtgctgattctgctggtgtcgctgctgccgaccatcatcggactgctcaaggcgaaattcggcaagaagcccggtaccgcggcgaactcatcgagtgtggcggccggcacgcagaacaactaacgcgaccggccactcctgttggccgcccggcctgcctgattacgttccgttgcgtcactgggtgagggctcacccagtgacgcaccccacgcacagtgacgcatatcagcccataaccggcacccaattttcacacacgccggcttgcatttggacatgggtcgtattaatgtgtattgagttgtcctgcgaagcaaggcaacatccaaggggctgtagctcagttggtagagcgcttcgttcgcatcgaagaggtcgtggtttcgattaccatcagctccacgaaggccgattccattccaccgggatcggcctttttcatttctcgcccccgatgaccatacgcccccgctggcgggggctgtcgagcacaacgagactgggggggtctagagccgatacggtaaagaccgcccccatggtaaagaccacccccagtcggctttcagtcgacagccccgccagcgggaggaagattcagcgaccgctggtggttcaggagctgaggcgctggcggatgaaggcattcagcgcttcggcggtgatgccggcgaagccgtcgatagaggcgcattgcggaccgtcggctttggcgttgcggttgaagccgagctgggcaatggtcgtggctccggacgcgacagccgaggcgatgcccgtggccgagtcctccaaagcgacgcacctcgcgatgccggggagtgccgcggcgccatcggctccggccacgcccgtttcgatgccgagcatcttcgccgccgccagatatggagccggatcgggcttatgcggcaggtcatcgtcaccgcagacgaatccggcgaacgcgccggccggcgcatgatcaatcacgttctgagcgagcctgcgcggcgatgtcgtgaccagcacggagggaatcccggcatcgaccagcgaccccagcacgtccagtacgccattcgtccaaggcaccctctcgaactccttcttggcgacgtaatcgaccatcgctttggcaatctgctcgggcggcagattcgtcccgtgctcgatcatcgttttcgcgcaatggtcaagcggagtgccagaacaggaccacgccagatcctcatcccaatacccgccatgcgccgcggcgatctccatctcgccctcgtgccagtagggttccgaatcgatcaacgtaccgtccagatcccagaacacggccttcaacaacatgtcactcatgcacaacccaccttgtattgacgccaactgtatgcctgcatgcccaggcaaccgggcttccgttttcattatcccagatgacctcgaagagagcgcctgattcttgacgtccattacacgctcatgactcagcaacgaccatacttcgaccgaggcaacccgcaattagcgcaaacgaaagcgggccgctggcaggatttccgccaacggccctcaagaccagtcaaccgattcggtacgggctgcggcaatcagtcgaaatcgaaacgaaccgttgactgccgccgcccagtcgagagacttaccgattcgcgcgacggcgcagcgacagcgtcacaccgcctgccgcgagcagcaccgccactgcggcaagaagaccgaacacatccgcaccggttttcgccacagcgtccggggtcggcttctgcacgtcgccggcaccggcgccagtgccgtcaccggtaccgtcaccgtccggcttttcgctcgggtctggagtgggatcgggatccggcccgggctccggctcctcgacagccgccagcgtcgccgtatatgtcacggtcacggcgtccgcgccctccggcacgttcgccgaaccgaccacttcataccggtgcgccgccgtatcgtttacggtcacgtcgatgccatccgcaagcacatccgcgggcttgaggccgtccgcgaccagggtccgcccgccgtcctcgccgatctcgtagacggcgtagctgtcggtgaccaccagcgaagctgccgcaccgatctgcatggtgtcgatgtgcgccctgtcggtgccctcgacgcgcccgaccggcagctcgccaccgttttcactcgctccgaccaaagtaacattggcggtgtcgtacggcagcgacgcgatgcggctgcctgacacgttgctcgggtacaggtcgagcgagcgcatcatgaatcgcgcgtagccgagatgcccggcgtagttgagctggccggccttgttgaaccacgcggtctttacgctcgcgtcagcggcgacgaccttgccgatccacgcctgcgcgtcgatgagcggcaaatcgtcttccttggccaccgtgcgcatagcgcctgcatactcgtcttccccgccgcgcacggtgaccggcgtcaccagcacgaccttggcgcccgcctccttcgccttggcggccacggagcgaatatgcccggcgaacgcggcggcgtcgctttccgcaagaatcccgtcagcatcatacaggtccggagccaagaagaggatgtccggcgaatactcgcccaccatcgcagcgtagtcctcgtccatctgcttggcagttagaccgccctgcccggccgccacgaagaacttggcacgctgcagttcgcggtccgtggcgctcagcccggtgacgtattcccagcgcacgcgctcgtcgagcagctgcacgatgttcttggcaatcagatgatccgtatacccaccttcgatggtctcgccacccacgaacacgatatttttgcgagcaccggtatcggagatgatcggctgcaacgcgttcaccgccgcatcgaccttcgttaccgccacggcactggtttcggcgctgattcgcttggcttccgcatcggtcagtgtgcggctccatgcggcgacgtaatcgacaatgccggtgagctgctgcgcgccgccggcgctgtcggccccgcggatcgcgccggccgtggccgtgttcaccgtgatcgcgcccggcacgttcagctgagtgcccgcgccgccgctgatcgcgcgcatcgcggctccgtcaacatagatcgtgaagccgttcgccacgaagttcacggacaccgtatgccatgcgccatccgcgaggtcgttcgtgccgaccgtgtagaagtcgccggtgttgccggagttgaggaactgcaccagaccggtcgcgctcaggcgcacggtcgcgcgggtcgcggagtcggagtcgcccagcgagaacagcgtctgcggctgtccggtcgccgacgcacggaaccggatggtcacgttggactcccgcttgccggccacagcgctcaccacatcgccgcccaggtcaacgtactgtgcgccggagaggaacttgcccacggacttggccgcggcaggggcgggttcaagcccgtccgagcccttcagcccgttgccgtcggcgtccaccgtcacggtcggcttgtccagtgtcgtgtcggagctgctccaccgggcgagcgggtcgtcgttggcgatcatattgagcgctcccagcgtgaacttggcccattcgatgtgcccgttctcgccggggtggatgtcgttgccggcacccatatacgtgccggattcgcggttgccgccgccgagttccagccactgcttgttgaagtccaccagcagcacgttcttgtcgagcgcgagtcgacgttccgcgtcaaagtacgtgtcgaggttggcgttgaacgtcgtgttggtcgtgtagttctgcgtctgcagcaccgggatggcgccgaggtcgcggatcttgtcaatcagtgtggacaggttggcggtgtactggtcgacggtgaacgcctggcctgtacgcccgtcgttcatgccgaacgtgaggaacacgacgtcggggtgcttgtcagacacccatttctcgaatgcgccgtccttgagcggccaactggcgtccgcgctggagatgccggtgttcatgaccacatcgttggcgcgggatacaccacgcaccgacgcggtgtccagatggttcgcgaacagttccgaataggtgcgatagccacgcgtgagctgcacgccgtgcgtgatggagtcgccggtgaacagccagttgatgcggtcggtctttgcgagcttttcggagagcgtctgccagtcgtcgagcgcctcgttgcgggtcttccatgcggcgatgtccgccggcagttcgaccggctggctcacggtgacgggatcgccggtgatggacaccgattcgagcaccgtctcgccgctcgtgtcggcggtggcgtcgatggtcgcactcggcgtgaacgagccggctgtcgcgtccgcttccgtcaccgtgtggtaggcgagccgcttgccgttgccactgacgcatgcaccggtcgttcccggatccaacctgctccaccggcatacgggtgcggggttgctcgccgactgcggggtcgtcacgccgtccagattggatttgcgcggatagaccgcgaatgactgcgtgccgacgttctcataggtgatccggtaggtcagcgtgtcaccgaccttgaccggggctccgttgtcatcggtacgttcgatggtgagtttgagccgcttggctgcgggatccggttcggtgacggtcaccgccaactcgccttcggcgaagctgtgcagcgtgtcttcggactgcgcgtacttgccggtgatcttcatcgtcgctttcgcgacggtaccactgacagccgccgcaggcacagtcaccggaacgttcacggtcgcgctctgaccggcggcaagattgccgacgttcacggcttcggcgctccaaccagacggcagacctgtgggggtcacggtgacgttcgtgtagtcggtcagaccgtcgttggtgacggtgaccggcgcggtcagcgtcccctcgccttccttgacggtcgcggtgccgctcgccgtggcggtgagatatcccagccattccatcgacacgcgcgtgtaggtgatgctttcgccttcgtacagcagaccgtaaccaccgccggcggcgtcgttcagcgcggtgatgaccgagtaggccatcgagccttccttgaacagcttgccggccgaccatgtggtgccgtcatcgaatgaaacacgcacgacaccgttcgcacggccctcgttgctcgcacgcggcgccgaatacagcagcaccttcgccttcgccgaaccttccggagcgttcgggaacgcacgcgtgatctgcgcgttgttgttcggatccggcagctgggtctccgacttgatcggaccatagttcacgccgccgtcctccgagatcgcaacgcgacggtatcccgccgcgcccggatgggagttgagcatcacgcgaccgtcggacagctccacgaccttgttctcgtccatgttcgcttcggtcacggggttgccggccttccaggtcttgccatggtcgtcggaatacacggacaccgcgatgttcgtgttgctcgtggtgcgcacagcgtattgctgtatcaaacggcccttgtactgcccgtacttgagctggatgccatggccggaggatgcgaaacgggacttccattcgtcttcgtgacccttggtgatgtctttggtgatgttgcgcggctcgctccatgttgcgccgttgtcgtcggattccatgacgacggcctgcagcacgttgcgcgcatcttccacacccaatacggagccaaagtagccctgatcgtacgatttcacgcagaacaggaagatcttgccggcttcctcgtcgaccacataggacgggtcggagtagccgtatttgttggtggcgctgcgtccctgcgccacgtatgccagcgtctcccatgacttgccgccgtccttggagatgcgctgcacgatcgagttcgggttgggcgcgtccgccgccaatttcggacgcaaatcccatgcggcgagaatccagccgttgggtgcctgcgcgatggcggggatgcggtagtaatcggtgttgccgatctgcttgttggtcgccagcaggagcggttcgccgtctttgcgctccgtcggcgtggacgcggcgtcgtcggccggccccgcgacggtcaccgtgccggtggtgaacgtcatgtcatcttgcagcacctgcgtgccgtcgcggtccgatgtggcgcggaatgtggctgtcggcgtgtatctgcgggccacgacgtcctcagcggtgatgacgtgataggcgaacccacatgatgcggtctggttggcctctactccggatcggcagctgtttctcggaaaggacaccacgtccacgcgttcgatgttcgactcgctcgggtaggcataaatcttctgcgcggttttgttggtgtaggtgaagttgaaggtcagccggtcgccgatcttcacgttatcgccgagcgtatcggtacgctgcatggcgacgcgcagtgtggaggtcgcagggacggccggcaccgtctcgccggtgatgtcgacgctttgcagaacgccattggtgccgtcctgagtggtcgccgacacggtcgcggtgggcgtgaagccgtttgcgacatcgtcttcggtcaccacatggtaggcgaactccttgctcgcgctccaagtgcatgcagccgaagcacccgccgcgagattcccccaccgacacatgggattggggttgctcgccgactgcggcgtggcgacattgttgaggttcgacgccgtgggatgcacaatgaaaccggtatcggaaacgtttttgtagccgagactgtaggtgagcttgtcgccgacttcggccggggtgccgttgctgtcggtgcgggtcagggtgagttgcagatattcttgagggggttcgtccgccgcattcgcgctgatggtgccggcggcagcactgccagcatggcgatggccaccagcagcccgctgagcttgcgcatcagcgtttttgctgtggcacgtcggaatattgtggtcatatcgagactttcttctctgcggcaggtcagcttccgaaccgatacgggggtagcagcgtcttcttcggcgcagtcggcttctttaccgcatattatttatgaactatcggttatatgagaatcacagcgatacgctgaaatttcactcattatagtccacaaagcaaacgaattacaacatgaaaaagcccccgtgtttcgggggcttttcctgtatgccgtcactcatcggccggacggtttaccgccgcggcagtgaggtctcggtcagatcagtgaacggagcggcggcgcagcgacaacgccgcgacaccggacagtgccaacaagacgaacacgatggacatgcctgccgtggaagcgccggtcttggacaggccgggcttctcggtgggcacgtcgaccttcggtccggccggcttctccggttcgggcttgggttcgggctttggctcaggatcggcgctcttctcggccacgtcgatggtgaacgaggcagtcaacggatccgcaccctccacaggcacactcaccgtgaccgtcaccacaccagccgctgcgaacggctcagccaaatcaaccgccttgccgtcagcgtccacagccgacagcgaatactcgccggcagccaacgccttcgacgaaccatcactcatcgccgcggtcaccgacaccttcgacgcatcaaacacgtcaccgaccttcacaccagcctgcgacgtcaccgccgaaacacccgtgatggtcggctccggctcaggatcgggctcactcttttcggtgacgttcaccgtgatggagccgtcaaagccggtcgtggcgttggcattcgcagcggacgtgccggtcacgcgcaggacgatcttggcgacatcgtccttcttggcagttgcgggaacattcaccgtgacggtcacgtccttggacgcgccgctggcaagagcgcccacgttcaccggagaggcagaccatccggtcggcagatcggccggagtcaccgtcacgccggtgtaatccacagaaccgacgttgctcaccggaacggtcacgtccaccgtgctggcaccctcttcaaccgaagcggtcacgtcgtctgcggtggcggacaggtagccgagccaatccatggaaatgtgcgtgtacatgatgtcgtggctgtcaatgccgccgccggtgacccaagcgccttcgtacagcagaccataaccaccgccagcggcaccgctcagcgcggtgatgaccgagtaggccatcgagccttccttgtacagctttccggatgaccacgtggtaccgtcatcgagcgagatgcggaccacgccgttcgcacggccctcgttgttcgcgcgcggcgacgagtacagcagcaccttcgccttcgccgagccctcgggagcattcgggaacgcgcgcgtaatatgcgcgttgttgttcggatccggcagctgcgtctcgtttttgaccgtaccgtagttcacgccgccgtcctccgaaatcgccacgcgacggtaaccggaaccgttacccgggcgggagttgagcatcacacggccatcagacagctccacgaccttgttctcatccatcagcatgcccgtcaccgggttgccggcctgccaggtcttgccatggtcgtcggagtacacggataccgcggcgttcgaaccggtcgtacggcccacggcatactgctgaatcagacgacccttgtacttgccgtacttgagctggatgccggcaccggaggtggcgaaacgggacttccactcgttctcgtaacccttggtgatgtcagcggtgatgtcacgcggcttgctccacgtctcgccgttgtcctttgagctgacgacgaccgcatgcagcacattgcggttgctctcatcgacgccaagctgagagtcggcgaagcccttgttatacgagtgaacgaagaacaggaagatctcgccggtctccttatcgaccacataggatgggtcggaatagccgtagcgttccggggcgttcttgccctgcgcgacatattggatcggcgtccacgacttgccgccatccttggagatgcgctgcacgatggagttcggctgcggggcatcccagcacttgacgccgctgccgttggccatcgccgtattgggacgctggtcgaatgcggcgaggatccagccgttgggcgcctcggcgagcgccggaatacggtagcattcggtaccgaggttctggcgggcggtggccaggcgcacggcctcgccatcggcacggtctgtggggatggtggccggatcggggcgcttgccttccttcacggtgacggtatcgccggtggagacgatgttgtcttgcagcacctgagtgccccctcggtcagaggtggccttccacacggtacgcggggtgaagctgccggccgtgagatcatccgcagtgatggtgtggctggccgtggagcaagggtaggaagcgcctcccgcaaggttctcataacggcagttcggcgttcctgtggtcagcacaccgctcagattcgactcggcggggaatgcggtgaatgccgaactcgtgttgttggtgttggtgaaactgtaggtgagcgtgtcaccgacatatacctcgtcgccgagggcgtcggtacgcgtcatcgtgacggtgagcatgtcagcatcatcgctggccgcactcgcggtggatacccctgcgggcagtaccaccagcatggcagcggccgccaccagcgcgccaagacggcgcagcagcgatggcttggtcgaacgaaccatgtgtgttcctctcctgtgcaacgccgggtcacgactttgggccccgaccgccgttccacctatgggacggcatggcttcctcaccatcaagcgttatttgtatagtatcttgctattcaatcttcattggcatagcaaaatcgctgtcgggtacagtattatagcctacattgtgaacaaaatgacatacaattgtctgcaattccgtatcattcccccacttcccatccagcacccgcccaaagtcccatccgacaggaataaaacgggacgatggcgggatacaagacgtccccatacgacaaaagtcccatccagcggatgccagatgggactatgacgggatgatggccgcctattcgcgaccggatgtgatctgcaacggtgcgatatatgcgcgcccgcgccgacgcacatgatagaacggcgactgccgcacctcgacgacttcaccatccataccggcctcgaacacgctatcgccgtccagtcgacggcgaagatgccgaatctgccggcgcagctgcctgttctcctcctgcaacgaaagaatatgcgtgacgcctgcgagattgataccctcgtcctggctcaactgctgcgcctgcgcaagacgcgccacgtcacgaagcgtgtagcgccgcgcacccccctccgtgcgctgaggcaccaccagaccaaggcggtcgtactgacgcaacgtctgtggatgcacgcccgcaatctgagccgcctggctcaccgtgaacaccggcatctccacgttcaagccgagcgcgtcgattgcatcgagatcaacgccgccggagaccaacgccgcggcgcaagcagcatacgcacgcctgacttcctgtgcgattcgcgccatgatcatcatctccttaacgttgattatcggctgcggggtgatggtgaaccgcccccagtcgctccgcgacgatgtgagatgccgccgggaggattaccgctcggcggcaaccgcttcggcgtagccttcgacggacttgtcgaattccttcgcggcgtgcttcgcgcccagacccggcttcgcgggcacgcgaatctgcacgcaaccaatcaggtcgccggcagtggcggactgaacgcccttgccgctgacacggatctccgcgccactggacgagcccgccggcaccttgaacgtgacggtctcgccatcgatgtcatgcgcttccacgcgggcaccggccacagcctcgcctacggtcaccggcacatccatgacgatgtcatggccgcgcatcgtgaaccgcggatccggcttcacctgcacggtcagatacatgtcgccgttcgcgccgccgttgctgcccggcctgcccttgcctgcgatacgaatcttctgcccgtccttgaccccggcgggaatatgcgtcttgaactgcttgccgtccacgcgcagcgacacggtagcgcccttgaccgcctgacggaacgttaacgtgatcttggacttgcggtcatcgccgcgctgcggagtcggcggctcctcatacgggttaccgtaacgcgaaccgccatagctcgcaccgccacggccaccggcagccccgccgaacatcgagaagatgtcgttgagattgctcggaccgccgccggacgtgctgaagcgcacattgccgccgttgccgccgaacatcgaaccgaagatatccgagaatccggacgcgtcgaacccgccctgaccggagccgccagagaaacgcgccccacccatgccgaactggcggatcgcgtcgtacttctgccgctgctccttgttgctgagcacgtcgtacgcctcggagatgtccttgaacttctcctcggcctccttcgtcttgttcaggtcgggatggtatttgcgcgccagcttgcggtacgctttggtgatgtcatcctcggtggcgtccttggagacaccgaggactttgtagaaatccttgctcagccattcattctcagccattcaggtctcctttcgtgtatgcgtgtatgtgtgtcgtatgttgtttttttgttgttgcgtattggtgttcgtcaccgcggaggtcggcatgtttgctgtgaccggagcggagacgacggtgatgtgatcgtgtctgcggtcaacgcgcgaccgtgcggagaccgtagaccgtgcggagctggcgggcatgttgtccgacttcgctccaggccgctcgggccgaggtttacggtcggacaacatgcccgccagctccgcactcgttaggtgcagtgacttgcgtctgcatctccgagtcgggtgcatgttttgcgcgagtgtggtatcgcacgcttgctgcggtgacagcgagatgagacaggtggtttgcggaaatctgagggtagtcggatttccgcaaactcctcttgggggggggttagttttgcggggaggctactacgacgcgggcggcgcggatcacgcggtcaccgatgcggtagccggcttccacgaccgtgtcgacggtctccttctcggcctcggcgtccggcttgtgcaggatcgcctcatgcttggtggggtcgaattcctcgcctttttcgccgaacttctccacgccgaacttctcgaacgccttgtcgatcttcgcggccacggccttgaaggagtcgtccatctcgctgtgttcgcggatgcgatcgatgtcgtcgagcgccggcagcaacgcggtcagcacgtcgatgatgccatgctggcggaaacgctcctgctcgcgctgcgcacgattgcggtagttgacgaactcggcgcgttcacgctgcaacgcttcgagatagtcggcggcttccttcttggccttgcccagcggggtcagcgagtcgtcggcggccgctccgtcatccgcacccgcggcagcggagtcaccggtcttatcggaagggtccgcttcggcggacgccttgtccccagccgggccggcagcgcccttatcagcagacgcatccgcagacttggccgagtccgatgccttgccggcagaaccggcggcagcgccgtcggaagggccggcctgcccggtggcggacaggttgtccgcgtcaggcaggtcgttcaggtaatcgtccttgttgaactcggacatgattacttgttgtccttcttgtcgtcatcgtccacgacctcggcgtccaccacgtcgtcatcgccaccgttggaggcggcacccgacgcaccggcagccgcactggcagcatcagcagcgcccgcagcaccctgctgcgcgtacagtgcctcgccgatcttctgcgcggaagtcatgagctcgctctgcgcgctcttgatcttctcgatgtcctcgcccttcagggcttccttcagggcgttcaccttgtcggtgacttccttggcgatctcgtcggagatcttatccttgttgtcgttgaccagcttctcggtctggtaggcgaatgcctcggcctggttgcgggtctcggcgtcctccttgcgcttcttgtcctcggcctcgtgggcttcggcctccttgaccatgcggtcgatctcgtccttcggcaggcccgagccaccggtgatggtcatcgactgctccttgccggtgcccttgtccttggcggacacgtgcacgatgccgttggcgtcgatgtcgaaggtgacctcgatctgcgggatgccacgcggagccggcgcgatgccagtcagctcgaaggtgcccagcggcttgttgtcgcgagcgaactcacgctcgccctggtagacctgaatcagcacggacggctggttgtcttccgcggtggagaacacctcggagcgcttggtcggaatggcggtgttgcggtcgatgagcttggtcatgatgccgcccttggtctcgatgccgaggctcagcggggtcacgtcgatcagcaggacgtccttgcggtcgcccttgatgacgccggactgcacagcggcgccgacggccacgacctcatccgggttcacggactggttcgcttccttgccgccggtaagctccttgacgagctccttgacggccggcatacgggtggagccaccgaccagcaccacgtggtcgatgtcgctcacggagatgttggcatcgcgcagcacgttgttgaacggcgtgcggcagcggcccagcaggtcggaggtcatttcctcgaagtgcgcacgggtcagggtctcgtccaggtgcaccggggtgccgtcgggcgtcatggccaggtactgcatgttgatggaggtcgaagtggacgaagacagttccttcttcgcctgctccgcggcttccttcagacgctgcagcgcgatcttgtccttggacaggtcgacgccgtacttgttcttgacctcgccgacgagccagtcgatgaccttctgatcccagtcgtcgccgcccaggtggttgtcgccgttggtggccttcacctgaatggtggagaagccgtcgtcgtccttgccgatctccagcagggacacatcgaaggtgccgccgccgaggtcgaagaccaggatgcgctcgtcttccttgcccttctcaagaccgtaggccagcgcggccgcggtcggctcgttgatgatgcgcaggacgttcaggcctgcgatcttgccggcgtccttggtggcctgacgctgggcgtcgttgaagtatgccgggcaggtgatgacggcatcggtgacgggctcgccgaggtacgcctcggcgtccctcttcagcttcatcaggatctgcgcggagatctcctgaggcgtccacttcttgccgtcgatctcgacggtccagtcggtgcccatgtgacgcttcacggagctgatggtgcgatcgacgttggtcacggcctgacgcttggcgacctcgccgaccaggatctcgccggacttactgaacgccaccacggacggcgtggtgcgcgcgccttcggcgttcacgatgacggtgggctcgccaccttcaagggtcgcgatgcaggaattcgtagtacccagatcaataccaactgcacgtgccataatgtgtgctccttagatatcttgttcgtttacgtttgcttgctcaagtcttggccccgcggccatcggtgctcgatcgacgcccacgggtcttcgcctcaaggttgccctcgttttgccttccaaaacttgagcctacaccactcaactttcgagcaccagcttttattcccacttcttcacaaaaacttgagtcgatatcactcaagtccgctctcaaaactcgcagatacaccgatttcttagcgaaaaagccgccgtatctgcgagttctgagagcacccaaatgcaaagagccggccgcaaccatcacaggttgcagccggctggcgtatcagtcgccctaggcgacgtcacgaatcgcggcgagcgtcagctcagcggcgacccgccttgacggagcgcacgaccatcgcgccggcgcccagagcgagcaccatcagcgccaggccgagcacggtcgcgccggtcttgcccagaggagcggtcggctccttgacggtgccctgagcgacagtgccgctgccgttgccgccgttcggcgtcttgtcggcggagcctgaggcggacgggaagctcacggaggcggacttgccggactggcggccgttcaccgtcagcgtgtaggacgcgccctcagccggagtgaagtcggcgaacgagatcgaggtggtggccgcggtggcgacgcgcacgccggagagcggggtggacgtgttggactcggcgacgaccttcttggaggcgttgtcgaccagctggtacgacagcaccgcgtcaccgttgaagccggtgacggccgcgctgtacttgccgtccttgtccttgttcacggtgaccttgccgccgttggacaggttgttctgcgacgtggtgtcggtcgccaggccaagggcgccggcgatcgtgtagaagttatcggtctggtcggtcaggccatccacgcgggacgcaccgggacccgatgcggcgatgcgcagctgggtgccggtgtggctcatgttgccctgggccttgctggaatcggccgcaccttcggtgtcttggccgtcggagtacaggttcttcgcggaggtgccgtaggagatggtggtcttggagccgtcggcgttcttcagcacggtgctcagcgcgtagtacggctgggattcgacgatctgtgaggtgtgggcgtggtcggcggtcacgatgatgagggtgtcgctcaggtcgaccttcttgagggcggcggagatggccttgtcaaggtcgtcggtctcgccgatctggccgcaggcgttggcgttgtggtcctgcttgtcgatggaagcgccttcgacctgcaggaagaagcccttctcggacttcgggttggcctggagcaggtcgagcgccttgtcggtgaagtcggcgagggacgcgccctgattgccgagccacttggcgttggtggtgcacacggtcgggttctcgtccttggcggcgtcctgcttggtggccacagacgggttgaactgggtcggcaggttgccgtcgccgagcagggcgagcaccggctggccatccttgtaggtcaggttcttgaagccgtcgacgtcaccgctcttgacggtctggaaaccgcggtcagcggcctgctgccacagggtgttgccgttctcgtcgagctggttgaagtacttggcgccgccgccgatggtcacgtcggcgcgcgtgtcgagcagctgctcggagatggagccgatgccaccgttggccttgagctggtcggcgaggcacctgccgatgccggcgagctcggcgtctttgatatcgaccttgccgtcgccgttcttgtcggtgccgtcccacttgccctgcgggccgtagcaggcgcgctcggaggagtgggattcctggaccgccggagtggcatcctggatctcggaggtggtcacgttgccggtggcgaggccgttggccttggcgagctcaatgaggctgagctgcgggttgcccttgacgtccacggacacggcgttgttgtaggtcttggtgccggtcgcccagccggagccggaggcggaggagtcggtgaccggggtgatcacgccggcggtcttggaaccggtgagctggcccttggaatccttggccatcagcgaatcgttggagctgccgcccagcgagaacgtggtgtactggccgacgccgctttcggcggccttgccggtcgaggtctggagtgcgcccggctggccgatcttgtcgaggccctggaacgtgccgttgacgccgtgcaggtagttgcgtgcgacagtgatctcggaatctcccatgccgtcgccgatgaacaggatgacgttcttcgccttcgcgttgccgatcgtggcgatgcgctgggccccgccgtgcaccgacagggcgtccacgcccttgccgttcagatcgtaggtgccgctcgcggcgaacgccggagcggtcagcgcgcccagggccgcagctgaggtcaacgccgcgacggcgcctttgagcattttgttgatgttcatggatctcttcttccaatcacgaagccgggcatgccccggcggtcaatcaccggcgccgtcgggcacagcaagcctctctcggcagcgccggaaggcctcgcggccctcaccgagcaaactatgtcggccattcaaccgtcacgcgacgagtatccgaacgtaacgtgaacttccgcggtcattttccgtaaccgagagaacggttttcattttcaaagagccttacacacacccctttctctttgagaacgtttgcagtataatgaaacgaatatgatgtcggcagtcacggcacgatggggaattcaacacacagcaaaggagttgtctacatggataaagcaggaatacgcgaagtggcaaaagcggcaggggtctccatatccaccgtatcccgcgcattcgcccaccccgaagtcgtgtcggagaagacacggcacaaggtgctgcaggccgcggaccagctcgacttcaacatctcccgctcggccgcggccctgaaatccgggcagacgttccgtgtggcgctgctcatgaacgaggagatcaccagttggttcaacacccagatcttcgccggcatcaactcgatcatgcacgacgccggctatgacatctccgtcttccagcacatcgacaccgccgacatgcgccgcaagttcttcaccgacctgccagtgcgacgcaacgtcgatgcggtgttcgtggcgtccttcgccatcgacgagaaagaggtcgaacagctcaagcgcatccgcgtgccgatcatcggcatcaacacgccgtccatcgacggattcgacgcctccatcagtatcgacgacgaaaacggcatgtacacggccacccagcatctgctcaacctcggccacaagcacatcgtgtacgcctgctcggcggcgtccgagtccatggactcctcgatcgacgcccgcggccgcggattcatccgcgcctgcgaaaacgtcgagaagaggcgcgaactcaactggcaggtggtcaccgtgccgcgcggacgcgcgttcgccgattcggcgctgtcggcgctgctcgcgctggacgagttccccgacgccatctgctgccagatagacatgatggcgattccgctgatgctcaagctcgaacgctacggacaccgcacgccacgcgactactcgatcatcggcttcgacgacagcccctatgccgacaccgtcaacctcaccaccatgaaacaggacccgttcaagatgggacgttcggccgcccagaaggcaatcaagctcatcaacggagaggaacccgagaagccgcatgaaatcgtgcagccgactctgatgctgcgcgagtcagacgccctgtacacggactgaacccgtttcagaccgccagggcgcagaccaccagcgcgatcagaagtccgaatatgggattcatcacgctccaatcccaccatcggccggtcacgatcttgtcatacggggcctctgcgaccaccgccgcgaccaacagccgcaacccgtaccgccacacgtcaccggtgtgccgccagttcttgcccgcatcgttgtacttgtgacgccagtttgccgttaatgacggtgaggccttcggctccggcggcgtatgagccgtcgggtgtgttcgaggagctcagggtgatgttgccttcggcgtcgacgccggcggagggtttcttaccgacgtacatggacgtcagcagttccagcgctcgatgacacggtctcccttgtatacggacagaatcgaataatgagcggtatccagacgcagcagacgcgcgaaatgcgggtcgacccccagccaacgtgccgtaaggatgcgcagcacatgcgcgtgcgcgacgaacagcacggaatggccgctctccatcagcggcaccgcctgatcgatggcctgctgcacacggtcatagacgtcgctcagcgactcgcccggcccgttatgcacgggaacctgctcgccgtccggcagcgtctccgtccagtcgccttccattgtggggctcagcgcatcggggccatcattccatagctcccaagagccgccgtgcaattgcgcgatggtctgacgggtacggccctccgcccggccgtaatcccattccgcgagcgccggcagcgtacgcggagcgaacccggcgaggcttgccgtctgctgggccctcttcagcgggctggcgtacacgcagttctcgccgaatccctgcggaaacgccgtctgaatccgggtgccggcatcgcgggcctgtcgctcgccttcggcggtaagaggaatatcggtgcgcccggtatgctgcccggactcactccacacagtctgcccgtgtcggagcagaaccagtcgccctgccgtagccgcgttgccacctgtcgtttgagtcatatgcagtactgtactcaacctgcagcatattcgcatgccgaggcctatacgcgatgcgtctccacctcgcaaaataatggtgacatgacagaatttcaggatggaccgggcaacggcggatcgggcctcgacggttcaagcaccgatcggatcatcgaaggcttcgcccgaatcaacgagaaagtggatgccatgcgtaatcagcgtctgaacgaccccgactccctcggcgataaggccgtcaaattcgcgctgccgtccatcgcggggttcgtggccggcaagctgttcactctggtgtggaacaagttcgtcgcccgcaagcgtccatccgatggcacgggcgagctgggggacggagtcgtggaccagcaggagagcctgttcatgagcatcctgttcgccgcattgtccgccgccgtgggagccgcggtctcgcaactctccgatcgcggctccaaagccctcgtcgctcgccgtcaccgtcgccaatccgactgataatcgcttggcgtcgtccagcgcattgtcgccgtgcatcttctatgcgcatcagcccgttttgcgtctttaagtgcgcgccgaaacgacaagtgcgcgaacatagggacgcaaatggccctgtttgcgtccttaagtgcgcacggtcgtcgtttcgacgcgcacttaaagacgttttggggcgccagcattaccgacgtgttccccgtcagcgcaaatgggtggctcttggggcgtctctttgcgacaatgacagcatggttaccaacagcactatcgagacgctgctcaatcgcaggtccatccgcaaattcgttgccgagcccttcgacgatgataccgtcgccacgctggagaccgtggcccagcacgccgcttccagccagtatctgaacgactggtcggctgtccgtgtcaaggatccggcgcttaagaagcgcatgtccgagatcggcaggcagccgtatatcgccgaagcaccgctgctgtatgtgttcgtcgcggacgagcaccgcaatgcgattatcgccgagtcgaagggcgtgtccacggattcggacacctacggtctcgccggtagctaccggttctctcaggcccagaacgatgcggttctggctttgcatgcgatggagaccgccgcctattcgctcggcctgggatgcgtcatcctcggttccctgctcaatgatgttcccggtctgatcgaagcgctgcacctgccccagtacacgtatcctgtgctgggattggcgatcggcaagcccgatcaggctcccgcgctcaagcctcgcatgcctcgcgagctgcagttcttcgatgacgtgtatccgtcggatgatgacgccattgaatccatcaaggagcgtatcggcgcctttgacgtttcagtgcatgagtactacgatctgcgcaacaccgatcgtcccgttgacgcattcagcgatcagatcgcctcgattgcagcccagcgcatggacgccgcgcatcaggtgataccgaacgccacatcgcagggattccgtctcgaccggtaaatgacccccaaacgataatgggcggtggtcggaacccgatatcaggttccggccaccgcccattgtgttatctgactcgtgttgttcggccctcgcggattcgcctattcagcgaatgacgggagaagagcatcaacgccaccgcggcttgtagcccttcttgcggctgtgcggttttatctgctggttcagggggacatacgtgtgctcatgagcgggatcacgatgcgtcagatgccaggtgccgcagtattcgcaccgatacacccacagctccgctccgcgttcgataaggctctggtcggcggcatgctgcgcctgggccttgtcatggtacatgatcttgttcgaggtggaacagcgtttcggagtgaaataatgcatagcaacaccacagtctaggacaggaattcttctgttgcaacggctgttggttgttgtgtttgggtatgggtggacccccgggggttgtttgcctcgtccgggggtccttgtcgtgtggtgcggcggcgtgctactctcccacaccctgtcgggtgcagtaccatcgccgtgccaggtcttagcttccgggttcggaatgggaccgggcgtctctcctgggccatggccgccgcaaatcttgggttatcggccgggaaacggggtttcccgccggcgtgtggcggttcggggaccggacaatggacgcgattcgttgctgttgactgatcgtgcgcgtgtgaggaccgtgctccctgtgcgccttcgcggggccctgccgggtcctgcgccacacaccctcgcgggcgtgtggatgtgggttgcctctcgaccattagtaccggtcggctccacccctcgcggggcttccacgtccggcctatcgaccacgtgttctgcatggggtcttcagcggctcggggccgcatggaatccttatcttggagaaggcttcccgcttagatgctttcagcggttatcccttccgaacgtagccaaccggccgcgccactggcgtgacgaccggcataccagaggttcgtccacccaggtcctctcgtactatgggcaggcctcctcaagattccaacgagcgcagaggatagagaccaaactgtctcacgacgttctgaacccagctcgcgtgccgctttgatcggcgaacagccgaacccttgggacctgctccagccccaggatgcgacgagccgacatcgaggtgccaaaccatcccgtcgatatggactcttgggaatgatcagcctgttatccccggggtaccttttatccgttgagcgatgccgcgcccgtgcgccggcaccggatcactatctccgactttcgtccctgctcgatccgtcgatctcgcagtcaagcccgcttgtgcgattacactcgacacccgattgccaaccgggccgagcggacctttgagcgcctccgttactctttgggaggcaaccgccccagttgaactacccgccaggcactgtccctgaacaggatgactgttcgaggttagacatcaaacgagaacagagcggtatttcaccttgcggctccgcggatgctggcgcacccgcctcgaagcctcccgcctatgctacacaatccgcgcctaatgccaataccaaggtatagtaaaggtcccggggtcttttcgtccttctgcgcttaacgagcatctttactcgtactgcaatttcgccgagctcctggtcgagacagtggggaagtcgttacgccattcgtgcaggtcggaacttacccgacaaggaatttcgctaccttaggatggttatagttaccaccgccgtttaccggggcttgaattcaccgcttcgcagaaagctgacggatcctcttaaccttccggcaccgggcaggcgtcagagcgtatacagcggcttgcgccttcgcacgctcctgtgtttttggtaaacagtcgctaccccctggcctgtgccaccccccgccgctcatcaccgcagggggtctcccttatgccgaaggcacgggagcaatttgccgagttccttgaccaggattcgctcgatcgctttggtattctctacctgaccaccagtgtcggtttggggtacgggcggcaacgcgcctgacgccgaagcttttctcggcaccacggatcaccggattcgggccgtaaggcccccatcatcacgcctcgccccgacgccccgcggatttgcctgcgggacgggctcgaacgcttgaccacggaaaaccacctccgcggccggctgccctgatgcgtcactcctgcgctgacctactacgaggggggatcccaacgcgcccgcgccgcgaccccccgaaaggggagacggcacggacccggaggttagcgccccaggcctcggttgtttcggttcgctgccggtacgggaatatcagcccgttcatccattcgactacgcctgtcggcctcgccttaggacccgactcacccggggacgacgaacgtggccccggaacccttggtcatccagcgggcgggattcgcacccgcctctcgctactcatgtctgcattctcactccccaacggtccacggcaggcttgcgccgccgcttcgccccgatggggacgctctcctacccagcatccaaacggacgctgccgcgtcttcggtggcgtgcttgagccccgctacattgtcggcgcggaaccactagaccagtgagctgttacgcactctttcaagggtggctgcttctgagccaacctcctggctgtctatgcgactccacatcctttcccacttagcacgcgcttggggaccttagacgacgatctgggctgtctccctttcgacgacggagcttatcccccgccgactcactgccgggatacgcgtcacgggtattcggagtttggctgctgtcggtacccgatacgggccctcaagcatccagtagctctaccccccggacgtaatccccgacgctgcacctaaatgcatttcggagagaaccagctatcacggaatttgattggcctttcacccctaaccccaagtcatccccccggttttcaacccaggtgggttcggtcctccacgcggtcttacccgcgcttcaacctgctcagggctagatcatcccgcttcgggtccaggacacgcgactcaaacgccttttgagactcgccttcgctacgcgtaccccacacgggttacgctcgccacgtgccactgactcgcagactcatttttcgataggcacgccgtcaccccgaaaggctccgacggtttgtaagcgcacggtttcagagactgtttcactcccctcccggggtgcttttcacctttccctcacggtactagttcgctatcggtcagacaggtatatctaggcttaccccacggtcggggcggattcacacgggattccacgagtcccgcgctacttgggagacacgatccggagacgacgcgcgttcggctacggggccatcaccctctgcggcccggcattcaatccggttcgcctcacacgccgttttatcactccggccgggcccgccaggacccggacacacgctccctcaacaccacgcgcgcaacggctggcgcctgtcacacgcgcgcggtttggcctgatccgctttcgctcgccactactcacggaacatcctttcctgcaggtactgagatgtttcacttccctgcgtaccccccgcgcgaacgcggtgccggcccatgacggccggcgggttcccccattcggaaatcctcggatcaaagccctgctggcggctccccgaggcatatcgcagcctcaaacgtccttcatcggtactgtctgccaaggcatccaccatacgcccttgcaagcaacccgcacgacccatccgggaacggcgggaaaccgcaagcccacggcaaaaactccgctggcaacacaaatcatcacacaaatgatcacacacaaaacgatcaaacaccagactccgaagagtccggcgaaatcaacagcagaagacaccccccgaaagggcgtcccctgctcgcgtccactatccagttctcaaaccaccacgcacccgcacgcgagcccacccaccccaccaggggacgggcgaccggcacggggcacggaacaccagccacgccaaacggcgcggggtggcggtccgggaacccaaaagcatgcccgcaccactcctggacgcaccgcacgaccggcacgcccgaaggccgactccactcttccacaccagcaacccccacacacccggcacatccggggcaagggggcacacaccggccaccagacagtggcctgaaatctccgtagaaaggaggtgatccagccgcaccttccggtacggctaccttgttacgacttagtcccaatcacgagcctcaccttagacggctccatcccacaaggggttaggccaccggcttcgggtgctgcccactttcatgacttgacgggcggtgtgtacaaggcccgggaacgcattcaccgcggcgttgctgatccgcgattactagcgactccgccttcacggagccgggttgcaggctccgatccgaactgagaccggttttcagggatccgctccatgtcgccatgtcgcatcccgctgtaccggccattgtagcatgcgtgaagccctggacgtaaggggcatgatgatctgacgtcatccccaccttcctccgagttaaccccggcggtcccccgtgagttcccaccataacgtgctggcaacacggggcgagggttgcgctcgttgcgggacttaacccaacatctcacgacacgagctgacgacgaccatgcaccacctgtgaacccgccccgaagggaaacgccatctctggcgtcgtcgggaacatgtcaagcccaggtaaggttcttcgcgttgcatcgaattaatccgcatgctccgccgcttgtgcgggcccccgtcaatttctttgagttttagccttgcggccgtactccccaggcgggacgcttaacgcgttagctccgacacggaacacgtggaacgtgccccacatccagcgtccaccgtttacggcgtggactaccagggtatctaatcctgttcgctccccacgctttcgctcctcagcgtcagtgacggcccagagacctgccttcgccatcggtgttcttcccgatatctacacattccaccgttacaccgggaattccagtctcccctaccgcactccagcccgcccgtacccggcgcagatccaccgttaagcgatggactttcacaccggacgcgacgagccgcctacgagccctttacgcccaataaatccggataacgcttgcgccctacgtattaccgcggctgctggcacgtagttagccggcgcttattcgaaaggtacactcacccgaaggcttgctcccaaacaaaagaggtttacaacccgaaggcctccatccctcacgcggcgtcgctgcatcaggcttgcgcccattgtgcaatattccccactgctgcctcccgtaggagtctgggccgtatctcagtcccaatgtggccggtcgccctctcaggccggctacccgtcgaagccttggtgagccgttacctcaccaacaagctgataggacgcgaccccatcccacgccgatagaatctttcccacaatcacatgcgatcatgtggaacatccggcattaccacccgtttccaggagctattccggagcatggggcaggtcggtcacgcattactcacccgttcgccactctcaccaccaagcaagcttgatggatcccgttcgacttgcatgtgttaagcacgccgccagcgttcatcctgagccagaatcgaaccctccacaaaaaagcgaaagggaaccattgatgaccccaaaaattgacgcgacttcttaataaggaaaagaagtccgcacgaaaaaccccggcccccatcaagcgccctcgcgcacccacgggcaaacacccgcaggcgggaaccggactggcataaaatcaaccaaaaaagtagtacaaacacactcttgagttctcaaaccaccaccactcggccagctcagcaaccccagtgaagaagtccatcgctaaccggcagcgagtagataacttacacgagttggccgaccaacgcaaatcgacaagccccaagacacccaaaaccgttgaaacaacaacattccatcggcgtgtcgaaaatggccttcaaacacaccctatgaccagaatacccctcctggcagggcggaaaaaactcatatttcattgttctcgggcgtgtcgcaaactattcagaccatgttcaccgaggtccggcagcgattcacggcacctatcgaagccatccacgacaaatcggaaggcgtaacgccttcccggcgaccgcaggataccggggggcatgcggcggctcaccagttcgacacgatgatgcgataccgtcgagataacgacatgacgcggcaccgcgccgcgacgacactatgtgcaatggcactgaggttgcaatgacaccgggaggatgaaatgcagcacattccgtgggacggcgacatggcggaatttcccgaaccgctgcacaggtatctacgccctgggcatgtattcgacagcagctcgtccgccgaagcaaccgtatattattccgacatcggccagggatgctatatcaagaaggcccgtcacggcgcactgcggaacgaggcggcaatgacgcggtattttcatgacaaaggactggccgccgcggtgctgcattatggtcaggaccatgacagcaatgactggttggcgacggcatgtctgccaggtgacgactgcaccgcgtctctttacgtgagggagcccgaacgtttggccgccgtcctgggacgacggctgcgtatgctgcatgagcaggatccaaccggatgccctgtgtcgaaccgtacgaaagactatctggcggcagtggagcggaatcatgcgcagggatgtgcggaccgttccttcttcacgcgggtctacgggaacgccgacaccgaatcgatatatcgcctggtgcggcagcatggcgacgaattgcgtcacgatacgttgctgcatggtgattattgcctgccgaatgtcatacttgacgattggcggttcagcggtttcgttgatttggattgcgccggagtcggcgacagacatgtggatgtgtactgggctttgtggacgctatggttcaatttgcataccgatgcatacggcgaccgccttctggatgcctacggacgtgatctcatcgacatggagacgctgcggctggtcgccgcctgtgaggtattcggataatccgttccgtgcatgagagcatccgatccggtcgcgcctggatacaggcgacagcgattggacgacgatacgcgcagtgacgatacgcacagtgaaatacatggacgatgatgcataatgccgataacggacattatgttctctttggcttatgcgttgcagccattacattgagtacagtacgactccatcggcttccgtcctcgctgacggtagcccccgtgaagcggatgaggtgcgttgacctcatgcctgttggttgttgtgtttgggtatgggtggacccccgggggttgtttgcctcgtccgggggtccttgtcgtgtggtgcggcggcgtgctactctcccacaccctgtcgggtgcagtaccatcgccgtgccaggtcttagcttccgggttcggaatgggaccgggcgtctctcctgggccatggccgccgcaaatcttgggttatcggccgggaaacggggtttcccgccggcgtgtggcggttcggggaccggacaatggacgcgtcgttgctgttgactgatcgtgcgcgtgtgaggaccgtgctccctgtgcgccttcgcggggccctgccgggtcctgcgccacacaccctcgcgggcgtgtggatgtgggttgcctctcgaccattagtaccggtcggctccacccctcgcggggcttccacgtccggcctatcgaccacgtgttctgcatggggtcttcagcggctcggggccgcatggaatccttatcttggagaaggcttcccgcttagatgctttcagcggttatcccttccgaacgtagccaaccggccgcgccactggcgtgacgaccggcataccagaggttcgtccacccaggtcctctcgtactatgggcaggcctcctcaagattccaacgagcgcagaggatagagaccaaactgtctcacgacgttctgaacccagctcgcgtgccgctttgatcggcgaacagccgaacccttgggacctgctccagccccaggatgcgacgagccgacatcgaggtgccaaaccatcccgtcgatatggactcttgggaatgatcagcctgttatccccggggtaccttttatccgttgagcgatgccgcgcccgtgcgccggcaccggatcactatctccgactttcgtccctgctcgatccgtcgatctcgcagtcaagcccgcttgtgcgattacactcgacacccgattgccaaccgggccgagcggacctttgagcgcctccgttactctttgggaggcaaccgccccagttgaactacccgccaggcactgtccctgaacaggatgactgttcgaggttagacatcaaacgagaacagagcggtatttcaccttgcggctccgcggatgctggcgcacccgcctcgaagcctcccgcctatgctacacaatccgcgcctaatgccaataccaaggtatagtaaaggtcccggggtcttttcgtccttctgcgcttaacgagcatctttactcgtactgcaatttcgccgagctcctggtcgagacagtggggaagtcgttacgccattcgtgcaggtcggaacttacccgacaaggaatttcgctaccttaggatggttatagttaccaccgccgtttaccggggcttgaattcaccgcttcgcagaaagctgacggatcctcttaaccttccggcaccgggcaggcgtcagagcgtatacagcggcttgcgccttcgcacgctcctgtgtttttggtaaacagtcgctaccccctggcctgtgccaccccccgccgctcatcaccgcagggggtctcccttatgccgaaggcacgggagcaatttgccgagttccttgaccaggattcgctcgatcgctttggtattctctacctgaccaccagtgtcggtttggggtacgggcggcaacgcgcctgacgccgaagcttttctcggcaccacggatcaccggattcgggccgtaaggcccccatcatcacgcctcgccccgacgccccgcggatttgcctgcgggacgggctcgaacgcttgaccacggaaaaccacctccgcggccggctgccctgatgcgtcactcctgcgctgacctactacgaggggggatcccaacgcgcccgcgccgcgaccccccgaaaggggagacggcacggacccggaggttagcgccccaggcctcggttgtttcggttcgctgccggtacgggaatatcagcccgttcatccattcgactacgcctgtcggcctcgccttaggacccgactcacccggggacgacgaacgtggccccggaacccttggtcatccagcgggcgggattcgcacccgcctctcgctactcatgtctgcattctcactccccaacggtccacggcaggcttgcgccgccgcttcgccccgatggggacgctctcctacccagcatccaaacggacgctgccgcgtcttcggtggcgtgcttgagccccgctacattgtcggcgcggaaccactagaccagtgagctgttacgcactctttcaagggtggctgcttctgagccaacctcctggctgtctatgcgactccacatcctttcccacttagcacgcgcttggggaccttagacgacgatctgggctgtctccctttcgacgacggagcttatcccccgccgactcactgccgggatacgcgtcacgggtattcggagtttggctgctgtcggtacccgatacgggccctcaagcatccagtagctctaccccccggacgtaatccccgacgctgcacctaaatgcatttcggagagaaccagctatcacggaatttgattggcctttcacccctaaccccaagtcatccccccggttttcaacccaggtgggttcggtcctccacgcggtcttacccgcgcttcaacctgctcagggctagatcatcccgcttcgggtccaggacacgcgactcaaacgccttttgagactcgccttcgctacgcgtaccccacacgggttacgctcgccacgtgccactgactcgcagactcatttttcgataggcacgccgtcaccccgaaaggctccgacggtttgtaagcgcacggtttcagagactgtttcactcccctcccggggtgcttttcacctttccctcacggtactagttcgctatcggtcagacaggtatatctaggcttaccccacggtcggggcggattcacacgggattccacgagtcccgcgctacttgggagacacgatccggagacgacgcgcgttcggctacggggccatcaccctctgcggcccggcattcaatccggttcgcctcacacgccgttttatcactccggccgggcccgccaggacccggacacacgctccctcaacaccacgcgcgcaacggctggcgcctgtcacacgcgcgcggtttggcctgatccgctttcgctcgccactactcacggaacatcctttcctgcaggtactgagatgtttcacttccctgcgtaccccccgcgcgaacgcggtgccggcccatgacggcgggcgggttcccccattcggaaatcctcggatcaaagccctgctggcggctccccgaggcatatcgcagcctcaaacgtccttcatcggtactgtctgccaaggcatccaccatacgcccttgcaagcaacccgcacgacccatccgggaacggcgggaaaccgcaagcccacggcaaaaactccgctggcaacacaaatcatcacacaaatgatcacacacaaaacgatcaaacaccagactccgaagagtccggcgaaatcaacagcagaagacacccccgaaagggcgtcccctgctcgcgtccactatccagttctcaaaccaccacgcacccgcacgcgagcccacccaccccaccaggggacgggcgaccggcacggggcacggaacaccagccacgccaaacggcgcggggtggcggtccgggaacccaaaagcatgcccgcaccactcctggacgcaccgcacgaccggcacgcccgaaggccgactccactcttccacaccagcaacccccacacacccggcacatccggggcaagggggcacacaccggccaccagacagtggcctgaaatctccgtagaaaggaggtgatccagccgcaccttccggtacggctaccttgttacgacttagtcccaatcacgagcctcaccttagacggctccatcccacaaggggttaggccaccggcttcgggtgctgcccactttcatgacttgacgggcggtgtgtacaaggcccgggaacgcattcaccgcggcgttgctgatccgcgattactagcgactccgccttcacggagccgggttgcaggctccgatccgaactgagaccggttttcagggatccgctccatgtcgccatgtcgcatcccgctgtaccggccattgtagcatgcgtgaagccctggacgtaaggggcatgatgatctgacgtcatccccaccttcctccgagttaaccccggcggtcccccgtgagttcccaccataacgtgctggcaacacggggcgagggttgcgctcgttgcgggacttaacccaacatctcacgacacgagctgacgacgaccatgcaccacctgtgaacccgccccgaagggaaacgccatctctggcgtcgtcgggaacatgtcaagcccaggtaaggttcttcgcgttgcatcgaattaatccgcatgctccgccgcttgtgcgggcccccgtcaatttctttgagttttagccttgcggccgtactccccaggcgggacgcttaacgcgttagctccgacacggaacacgtggaacgtgccccacatccagcgtccaccgtttacggcgtggactaccagggtatctaatcctgttcgctccccacgctttcgctcctcagcgtcagtgacggcccagagacctgccttcgccatcggtgttcttcccgatatctacacattccaccgttacaccgggaattccagtctcccctaccgcactccagcccgcccgtacccggcgcagatccaccgttaagcgatggactttcacaccggacgcgacgagccgcctacgagccctttacgcccaataaatccggataacgcttgcgccctacgtattaccgcggctgctggcacgtagttagccggcgcttattcgaaaggtacactcacccgaaggcttgctcccaaacaaaagaggtttacaacccgaaggcctccatccctcacgcggcgtcgctgcatcaggcttgcgcccattgtgcaatattccccactgctgcctcccgtaggagtctgggccgtatctcagtcccaatgtggccggtcgccctctcaggccggctacccgtcgaagccttggtgagccgttacctcaccaacaagctgataggacgcgaccccatcccacgccgatagaatctttcccacaatcacatgcgatcatgtggaacatccggcattaccacccgtttccaggagctattccggagcatggggcaggtcggtcacgcattactcacccgttcgccactctcaccaccaagcaagcttgatggatcccgttcgacttgcatgtgttaagcacgccgccagcgttcatcctgagccagaatcgaaccctccacaaaaaagcgaaagggaaccattgatgaccccaaaaattgacgcgacttcttaataaggaaaagaagtccgcacgaaaaaccccggcccccatcaagcgccctcgcgcacccacgggcaaacacccgcaggcgggaaccggactggcataaaatcaaccaaaaaagtagtacaaacacactcttgagttctcaaaccaccaccactcggccagctcagcaaccccagtgaagaagtccatcgctaaccggcagcgagtagataacttacacgagttggccgaccaacgcaaatcgacaagccccaagacacccaaaaccgttgaaacaacaacattccatcggcgtgtcgaaaatcgtcaaaatacgccttcaataccaacttcagaccgtctttcgtttccaaatcgttagaaaaacggtccttgtacggcgtgttgtgcaatgatccccacacagacggcggccattcacccaccgttcaacgccggaaggcagacacattcctgtggtaagcctgtaatcatgaaacacatcgcagtattgacgggcgccggcatctccacgtcggcgggcatccccgacttccgcggcccggatggcgtctggaccaaacaccccgagcaaatgagcgtctatgacatcgactccttcctgtccgataaggaggagcgcgaatactcctggcgctggcagaaggaatcaccggtatggaacgcgcagcccggagccgcgcacaaagcactggtcaaactggagaaagccggcatgctcacgctgctcgccacgcagaacttcgacgcgctgcacgagaaggcgggcaacagcccggacgtcatcgtcaacctgcacggcaccatcggcacctcacactgtatgaaatgccacgcgaaatacgacaccgccgacatcatggcccgcctggacgaagagcccgacccgcattgccaccgcacgcttccctatagtggcggtatgccctgcaacggcctgatcaaaaccgatgtcgtctatttcggagaggccctgccggacggcgcaatggagaaatcctataagctggcctcgcgcgcggacgagctgtgggtcatcggttcgacgctggaagtatatccggcggcgagcatcgtgcccgtggccgcacaggcgggagtgccgatcaccatcatgaacatggggcgcacgcaatgcgaccgtctcgcgtcgcgtctgattcgcgacgacatcgcagttgcgctgccgaagctggtggacgagaccatctccgcggcacagtaacggcgcagtagcggcacgtctatgcaacggccagtcatgacggccggcttatacgcagcgggggcgcccggacgagatggtccgggcgcccccgcatatcatcggcgtcaaagccgcaccgcttcatttcgcatctgcgaaagccggcggaaacccacggcgtcagtaaatgcgcttgggctggaagcctgcctccttcagcgccatgagaatatggtcgatgtgatccggaccattggtctcgacggtcacaccgagcgaaaccgcattcgtatagtgaccggacgccttgaactggtcgtgatccagagcgataacgttcgcgcgttcacgagcaagcagctgcgccaccttgaccagctggccaggggtgtcaggcagctccacctcgaagttcatgatgcggccgcgggcgatcatacccttctgaatcaccgcacccatcgtcactgtatcgatgttgccgcccgacatgatcggcacgaccacgtgcgggccggtcgcggaggcgaacttgcgcgaacgcaggttcaggtgttccaaagccgccagagataccgcgcccgcagcctcgatgaccagcttgtgcttctccagcatcagcaggatcatctcgttgatatcgcgttcggtgacggtgaccagatcgtccatgaactcgttgagcagggcgaacggcaggtcgccggggtgcttgaccgcaacgccctcggcggacgtgacgacctgatcggcctcggtcacccgtccggcggcgaacgagttcttccatgccgggctgccttcggggatcgcgccaatcacgcgaacctcgggcttgaacgtcttgatggcgagcgccacgccggcgcccaggccaccgccgcccaacggcaccaccacgtcggtgacgttcggcacatcctccagaatctccaggccaatggtgccctgaccgcagatgacctcgtaatcgtcaaagggcggcacatagatcatgccttgcgtggaggccagttcggcggcatgggcggccgcctcgtcgaacacgtcgccgtacagcaccacatcggcgccgtacgccttggtggcgtccactttcagcgggggcgtaatctgcggcatgcagatcgtcgccttggcatgacgctcgcgcgccgcatacgcgacgccctgcgcatggttgccggcggacgcggtgacgatgccgcgggcgatctgctcctcggaaagcgacgcgatcttgttgtacgcgccacgaatcttgaacgaaccggtcacctgcaggttctccggcttgagcagaatctcatgcccggtcagctcagacagggtgcgagagggaatgatctcagtgtgacgcgcggtgcctttcaaacgcttggcggcgagcttcagctcggccgcgtggtcacgctgcaatgccttaaggacgtctttctgttccatactgcgtattgtatgcgtcgccctgccgaacggacgcggccgtctcacctgcgattgccgcagtcgcggcgacccgtcggaggactggccggaaaacagttgcacgtattcataagtcggcttcgttgcgaggctcccttcgtcgccgggcgtctgatgtatgacggtctcgatggtagacgaaacgtaatttattgccacggtatcgcgtgtttcttgcgcaaggaaagaaataacccgcataccggtccggcaattatcgtcgtgaggcgaagaagccggtgagcagacgggcgcatgccgcttcgcgaacgccgccgacgacctgcggcacatgcccgacgtgcggatcgcggggaatgtcccaaatcgaaccgcacgcccccagcttcgcgtcccaggccccgaagacgatgcgtccgatgtgcgtctggatgcacgccccggcgcacatcgggcatggctccaatgtcaccaccagcgtgcagtcggccagattccagtcgccgcgggcctgcgcggcctcacgcatcgcctcgatctcggcatgcgccaacggatcgtgcccctcctcgcgacggttgcgcccccggccgatcaccgtgcctcgctcgtcgagcaccacggcaccgaccggcacgtcaccctgcttcccggcgcgctctcccagcgcaatcgcctcgcacatcgcctcgtcaagttcgcccatgcgcccagtttatcgaaatcgcgctctcaaaacttgcagatacaaaatcagaaccgccatcagaaccgccattttccaatacatcgacttttgtatctgcgagttttgagagcgcgattcatgaacaaccaccaatcaggcaccatgccgatgccgtatattgaggcttatgggcgaagaagcagcacacgatacgacacgacgtctttccgacgtgattcccggacgattcggcgatccggtctcggtgcagtatgcctggatgtcacccgaaaacgccgaagcgatgccgacacggccgttgttcctcgcgctgcatggatggggatccaatgaacgcgacatcgccggaatcatgcagtacatcgccccctacaacgatgtggtgtcgctgcgagcgcctctggtcctgcacgcgccggaaggcgtatcggccggcgcatacagctggttccatgacgctgtgccttccggagacgacctggatcacgacatcgcggccgccgcacgcgcggtcgaccagtgggtcgacggccacatccccgcgacgcgcgacgtcgtgccgatcgggttttcgcaaggcggggccgtcgcggtccatctgctgcgcatgcacccggaacgctatcgcgccgtcatcaacctgtcgggattcctcgcgcccgcaggcgtgcccggcaccgcgccggcggatgaccggctgaccgactgcgagataccggtatatttcggatacggcaagaacgatgcggtcattcccaaatatgagctgttcgccgcggccgcgtggctggaagagcacacgtggctgacgacgaaaagctaccgcgggctggaccatgcggtgagcctggacgagttttcggatatccggcaatggcttgtattgcacgacatcgcgtccggcgtgctgtgacccgcgcgaacccatcggccgcgcccaccccgttcagatgctgctgtcggcgtccacactcatgacgaacacgttgcggcgcagggccttcgcctgggcgcgtgtgatgtcgcccgcctcgagcatgtcctggatgatgcccagctcgatgccgtagctctcgcgcttgatctcttccgcctgagtgatcgccttcgcgctgccgcccatgttcggccgtgacttcaacgcgccctcggcccggcgataatcgaggatcagcgccgagcagtgctccgtacggtaggtgccgcgtcccatctcctcatacatccgatccaccacgtgctccatcacgtcgagctgcagcagccgggagtgcgcgaacatctcgtcctcgctgatcagtggcgtggtacgccggatcttgctgctgatgcgccgtccgagattctccgcacggcgttcgaacgcgcgcatgcgcccgcgaatctgagacaccgcatggcccgaggaggagaccgtggacgtgtgccgcaacgtgttcatgatgtcatccatcatgcgttcgcatgcctccacgcgcatgtcctgctccgccgcatcatccagcgggtgcattttcaattcggcgagcagactcttgagatagtccttctcccagtgcagcgcctcgatctgcagccgctccaatccctgggggtcggattccccgacgcgctgcttcaatctcgtgatgcgcttcgtatacgactcgatgaccatgagcaccgcgcggcggttctcatcgtcgactcgccccgtcagctcctcgacagtcttgcgtaggatctctatggtgatctccgtcatttcgggtgccatgcggtcacggttcggagcgagcagaggcagcatgaaattcgccaatagtagcgtgacgacgatgacgccggatgcgatgaaaatcaactcgtcgcgcatggggaacggcacgccccaagtgacggtgaacgggatggtgaacatcagcgacagggtgatcgtgcccttggcgcctccgaaggtcatcaccgcggcgctgcgccaacgggccggcgtcatcttgcgccgtttgccagtgttgacgtcgcgcgccaaacgcagcatcccggccacccacaggaaccgcatcgtcaccacgaccagcgacaccagcagaatcacgatgctcaggcgcacgttgctcacgccgggatcgtcccaactggcgctcatcgccttcggcagctgcatgccgagcaggatgaacacggcaccgttgaggctgaacgacagcacaccccacacgctggacgacacgatgttggtgcgggcgacgttcggcccgatgccggtccggtcgaaccgcacgaacaggccggacgcgaccaccgcgagaatgccggacacgtgcagttcctctgcggtcaggtacagcatgaacggcaggaacagctccatcaatatgcgggtggtggtggtctcccaacccagcgagcgcacggtttcgaacagccagttcgcgagcaggccaatcgtcagaccgtatacggcaccgccgatgaacgagagcgcgaactcgccggcagcccggccgatcgcgaactcgccggtgatggcggcggcgatggcgaactggaagccgacgatgccggacgcgtcattgaacaacgactcgcctttgagcacgcccaactggcgcaggctcagcgacgcctccttgcccagcgagctgaccgccaccgcgtcggtcggccccagcgccgcgccaagcgccagtgcggcggcgagcgtcacggacggccagacggcatggacgacgacgccgaccgccaccatggtggcgatggccagtccgattgccaatgacaatgacagtttcagcgatttcagcaattcggatttgtcgatctcgtgcgcttccagatacagcagcggcgcgatgaacagcaccatgaacagttcgggattcagggaggcgttggggaatcccggcacctgcgtgatgatcgcgcccatcgcgatctgaaccagcggagtcgacaccttggggatgaaccggctgatgaacgacgagaatacgacgacgccgataatgcacagtatcagctgaaagacttccaaggctcgctccggctctccgtcggttgtgtgggattacttcacaatataaaccgactccgcacccgacacgttaacttcggcgtccggcttaacggctgcgcgcgggcaaaaagaaaccccggcggtgttgcccgccggggagagaaaggagagagaagaagaaaggggttcagttattgagaatcgtgctgccgattcccggtcggcttgtgctgacaattaatagtaaaacacccgtttcttggtgcaatgctgagattgtctgaaagcttcctgtgagttgatgtcgcgggctgaatcccatcacatggtaatggctgtagactgtagtgtggcgccgtgcgccatacacgtgagcgcgaaaaggagaatcctcatgctgctgtccgaccgcgacattctcgccgcccagaaggacggtcatatttctcttgacccatggactccggaaatggtgcagcccgcgtcgattgacgtgcgcctcgaccgtttcttccgcctgttcaacaatcatgcctacacatacgtggatccggccgagaaccagggggcgctgaccgagcagttcgacgtcgctccggacgagccgtggatcctacatccgggcgagttcgcgctcggctcgacgtgggagtacgtcaagctcgacgcgacggtggcggcacgcttggagggcaaaagctcgctgggccgtctgggcatcctcacacattcgacggccggcttcatcgaccccggtttcgaggggcatatcacgctggagctgagcaacgtgtcgacgcttccggtcaagctctggcccggcatgaagatcgggcagatgtgcttcttccagctcagctctccggccgagcacccttacggctccaagggcaccggctcccattatcagggccagcgcggcccgacccccagccgttcctacgtgaacttctacaaggccgacgtcaacgactagagccgatacccaagttctttgacgcaatgtgccggcgactccatgactgggccgccggcacattgttatgctccgttcgatgccgtctggcttattggcgaatggcggtgaacagcaccgactgggccggatgcagcgatggagggcgcaacccgtaggtcatcagcgcccggcccgtcatcagcacgccgtctttggtccaccagcccaacggcgactggccgctgccaagaccaagcccgtcgagatcgagatccagccacagcggctgtatgcggtacgtgccatcggggtcaagaccgggcacgcgaatcggcgccgcagggagagtctgggatgttgccagttgcgtgaaccggtagaacgccgcggaacgatccggcttgaccatgccgtcgacccggacggccggatcggcgatatcggcgtgcacgcacgtgtcgatcgcaaaccatgcgcggtgcctcttgtattcggcgacccattcgccgagcttgttcaacgcctcgtccggctccttgagcagattccattcgacgcccatgtgcccgaagaacgccatcgccatgcgcatctcctggctcgtggcgcgatgcgtggaatgtgcaggactcgcccccacatgctcgcccatcatgcagggcggcacgagcagcgacgtgtaccgctgaatatcggcccgctcgaccgggtccacgcagtcggacgtccacacgcggctggcgaattcgagtatgcccaggtcgatacggccgccgcccgatgcgcaactctcaatctccagtcccggatgtgcgacttcgaggtcacggaacatccggtacacggcgagcgtctgcccgtgcaccgccggcctgccggtacgtggcgagaccgcctcggtgacgaatttgttgtggtcccatttgatgtagtcgatgcccaactcgccgaccagcgcatcgatggaatcatggatgtatcggtaggcgtcgggattggtcaggtcgagcacttgctgcgagcgtccctgcatcggcagacggttcgcagtcgggcgcagcacccagtcagggtgggcgcgggccacgtcggaatccgggttgaccatctccggttcgaaccacaggccgaactccatgccttttccgtgcacgtaatcggcgagcgccttgaggctcttcggcccgtccggccacacatcctgcgctatttgccagtcgccgagcccggatgtggagtctcggcgggagccgaaccagccgtcatccaccacgaaccgttcgacgccggaatccccggccttatcggccagagccttcaacgtgtcgtagtcatggtcgaaatacacggcctcccacgtgttgagaatcaccggacgcggcttgacggcgagatccgggtgacaggagcgcacgtaatcatggaatctcgcagccacctcgttgagcccgtcaccgtacgacccgtacagccacggggtggtgtacgtttcgccgcgggcgagcgtggcctcgccgccgagcagcacctcgccgccgccaatcagaccggtcgtatacggctgacgctctgccgacagcacggaattgccgctccagcccacatgcgccgaatagacctcgccatgctcgaacccgaagccgggctcgcccgcggaaagcaacagagaggcgtcaaaacctgggcgccccgccatcgagaccttctcgaagcgtccttcggtcagcggctgccgctgcgggctgcgttcgcgcagatgatggccggtggtggtgagtatctccgtggcaagtgccgggagcgggaagccgagttcgactttaccgacttccaagtcaccggtcggaagattaccggctggaagattacgcagcgtggtgcgctgtctgatcagtccgccgggcaacagttcggccgtccatgacagttccacgccctgctcggcatccgacgcggtcacggtgacgaccggcacctgttgcgtgacggtatgcgcggcaccgtccacgccgtcagacacgtcaacgccttggcgttcgtcctgacggattgcgatgccggtcaccgtgaatgcacagaacggcgttacgccggcgcgccggatatccagtcgcggtgcccctatccacgactcgctttgcgtgggcatgatgcttggccaggcggtctcgtccagcgcgccggacacgcgctgcggccgcagggcgtcgtatgcggcgagtacggttcccggcgccgcgagcggtcggccccagtgcacgaagcgcggaagaccgtgaccggcgaagaccagcgcgaacgccacatcagcagccggctgctcagcataaatagcggtgagttccgttccatcggcggcggcgccatggaattgttcgatgagtgacattgcgaatcccttcggaacgtgccattgatatatggttcgcctccgatgctacgacatcgttccgtcatgtcaccgcatattcagcgattccggggtatgagaagggctcccgttttccgatgtggagagcgggagccctgacgccggtggaggcttatggcattgttatgccatgatgccgcgcttgcggtcgatggcgcgcatgatcgccttgtagatttccgaggcgatcagcacgaccgcggcgaggcagatgcactcgacccatgcccacggtccgagcggcgtggtgccgaacgcggagttgaggaacggcacgtagatcaccacgagctgcagcacgacagacaggccgatcgccccccacagccacttgttggagaacaggccgacgaacgcggactgacgtgcggaacgcgatgcgatcgcgttgaacagctgcgcaaacacgagaatcgtgaagcccattgtacgggcctcgatcatctggaattcgtgggtgccgccgatggagcggtcggtgaacaggccaccttcaaggtgcatgtccatgccgatcaaggtgacggccgccatgatgatgccgatgaacgcgatatcgatccacatgtccctgtcgatcacgcggtcggtgagcttgcgcgggctgcgtgccatcacgtcatcggtctgcgggtcgacacccatcgcgagcgccggggcggcgtcggtcagcaggttgatccacagcagctgcgtggcaagcagcggcacggcgacaccggtggttcccggctgcgtgatgccaagcacgccggcgagcatgacgccgccgaacacggtgaacacctcgcccacgttggagctcagcaggtagcgcaggaacttgcggatgttgtcgaagatcacacggccttcgcgcacggcggcgacgatggtggagaagttgtcgtccgcgagaatcatcttcgcggattccttggtcacctcggtgccggtgatgcccatcgccacgccgatgtcggcggacttgacggccggggcgtcgttgacaccgtcgccggtcatggcggcgatgttgccctggcgctgcagcgactccacgatcttgagcttgtgctcgggggccacgcgggcgtacacggagacctcagaagtcgccttgtcgaacgccgcctcgtcgggcatcgcgtcgagctgatcgccggtgagggccttgccgcccttttcgatgatgcccagatcggaagcgatgcgggccgcggtgagcgggtggtcgccggtgatcatcaccgtgcggatgccggcgcgatgcgcttcggccacggaatcacgcacttcggtgcgcggcgggtcgatgatgccgaccatgccggcccagatcaggtcacgctcgatgacgtcgctctgctcggagatgtcggtcacctggccggctgcattggtcttgatgccggggatatcggccagggatgtggtgccgagcgggcggtacgcctcacccagcgtgcggtatgcctcgccggacagacgctcgacggtcgcgagaatctcctggcggtcgccttcggtcatcgggcggacggcgtcgccaaccgcgatgcgcgtgcagtagccgagcagcacatcgggcgcgccctttgcatagacgctcaggttgccgttgtcgctgctgtccttgccgatcacggccatacgcttgcgctcggacgtgaacggaacctcggccacacggtcgagcttgccgagggcgcggtcggccttgatcttgcgggaggcgacgacgagcgacacctcggtcgggtcgccgacgatctcccactggccggcatcgttctgacgcaagtcaccgtcgttggcaaacgctccgacggcgatggtgcgcagggcttcggcgttgaccggagcgctctcctcgatggcgtcgccacccatgcccagcatcttgcccttgggctcgtaaccggtgccggtgagctgcacttcaccgctcggggtgacgatgcgctcgacggtcatctcgttacgcgtgagcgtaccggtcttgtcggagcagatcaccgaagcggatcccagcgtctccacggagctcagcttcttgacgatggcgttgtgcttggccatgcgctgcacgccgagcgcgagaacaaccgtcagaatcgtcgcaagaccttccggcactgcggcgacggccagcgaaacggccagcagcagcgagtcgatgagatcgtcgggcatcttgtggaagccctgcgtgatgaacagcgcgacgagcacgacggccgcgatgatgcacacggcaatgcccaggatcttggagacgtgggtcatctccttctgcagcggggtatcctcgtcatcggtctgcgacagcatgtcggcgatcttgccgacctgcgtgttcatgccggttccggtcacaatcgcgcggccggtgccctgggtgacggacgtgccgttgaaaatcatattggtgcggtcgcccagcgccttggcggagtcgagcgtgtcgggcttcttgcccaccggcacggattcgccggtcaggctcgcctcggcgatgcgcagcgacgcggcggcgaacagacgcccgtcggcggagacggtatcgccttcgccaagcaccacgatgtcgccgggaaccacgtcggcggtgttgatgtgcacgattttgccgtcacgcagcacggaggtctgcggtgccgtcatttgggcgagcgcctccaccgcctgctcggcacgggcctcctgaatatagcccagcaccgcgttgacgatcaggatcaggatgatgacgatggcgtcaaacggcagcacttcgccggccgttccgtgcgagcgctcgatgaaccatgcgatcagtgagatgacagtggcggcaagcagcaggtacaccagcggatcctggaactgcgccaggaacttcttccacttgggtacgggcggcgcgctggccaactggttcgggccgaatttctccaaccggcgctgcgcctcggcggaactcaggccggtattggtatccacatccagcgccttggcgacttcgttcgcctcggtcaagctgggatcgacgtcgtgaagcaggccttcctgcgactgcacgcctgtggattgatcatttgtgtgatcaaccataatggtctccttgatatagccgcggagtagtcagccctcacgatcaccgggatcgtcccctcccccggtcatctcgataaagctgcgcggttatgggcaccggcgcaactgctgccgatgcatactgttgccattattccacaaacccgtcatcgcttggcgaaacagccctttacgtgttgtccaaatatccgcattccgcgaacgatttcaggcgacacgctcacacagcgcgagcagccagcggagcgtcgccatggtgtaatcgaacagttcgtcgtccatgctgaaataccgctcgcagcactccctgctcacatcgaccatcgcaagaccttctggctctccgggtgtgaatgacgccgcccgatcctgcattcaggatacgtgccaaggcaaggaactccggcggcttcggaaccggacgagcttcgttccgttcctaagtgcgcgccgaaacgacaactctgcgcacttaggaacgcaaactatgcgatctgcgttcctatgttcgcgcactcggcgttccggcgcgcacttaggaacgcaaaccgagtctctcaggagattggggcgattcgcgcgccgcgaatggctgtttggcgtgggggtctgggacaatggcacgtatggcaatcaagaaaggtccgaccaaggggtcgggaggaaaacaccgcaatgcgctacgcggcaaggggccgacgcccaaagccgaggatcgcgtgtatcacaaggcatacaaggccaagcaggcgacgaaccgtcgcaagatggcagatccacgactggcagcccgccgtcgcgccgcgaagttcacgtccgattcggacgatctggtcatcggccgcaatgccgtgctggaggcgctgcgcgtcggcgtccccagcatgcagctgtatatcgcgacacgtatcgagcatgatgaccgtacacgcgagatcatcaagctcgccggcgcacaaagcctgcacctgctggaggccgaccgtctggaaatggatcgcatcgcccggtcgtcgaaccatcagggcgtcgtgctcaaagtgcagccgtaccagtattcgtctctcgccgagctggcggatatcgccgagcgcaaggccaaggccatggacgtggtgaattcgccgagtgcgcgcatcaacgcacgcccgctgttcatcgcgctcgacggcgtgaccgacccgcagaacctgggtgcggtgattcgttcggccgccgccttcggtgccaacggcgtgattctgccggagcgtcgttccgcttcggtcaccgctgccgcgtggaaggtatcggccggtgccgcggcgcatatcccggtggctcgcgtggtgaacctcaccaaggccatcgaaagcatgcgcgaacgtggatattacacggtcggcctagacggcggcggcgataagctggtcggcgaaaccggtttcgagaccgatccgctgatcgtcgtgctcggttcagaaggcaagggactgagccgactcgtgcgcgagtcgtgcgacgcgatcgccggcattccgatcacgtccatggtggagtctctgaacgcctcggtcgcagccggtatcagcctgtacgcggtcgcccgcgcccgccgcgaagcagcggcagccgccacgaagtaatacccatatctcccccctgctgccggcggggtcatcgagcggaacgaaaatcggggtggccaccgcaatcggcgcaccaccccgtccggttccgctcagcagctccacatatcagtggctccacaccgcggcatcaggatcgtcgtcgggattgtaatcatcatcgtcgatgggcttttcgtaattcgcctcatcgtcgaccacaccggaatccgcttcagcgttgagctcgttcacggctttgtcatccagcttgtagttcggcagcacggattggatgtagctttccacagcctcgcccatcggcacgtcgtggccggccttctcggcaaggaaccagcggtgatccagcacctcatggaagaactgtgccggctcgatctgcgaacgatattcacgtggaatcatacgcacggtcggctcatacacctcacgcatccaatcggtggcgacgatctccaactcctcgccttcacgccacgtggaggcacggtacgcatccagatcgttgagcaggcgccgcgcctgattctcctgcacatctaaaccggtcagtcgcagaagcttgcgcgacgcatagccggcatcgaccacgcgcgggcggaccagcacacgtttgccgtcctccgcggtcttcatctccagctcgtccacgtcgaagcccaggtcgttgagcttgttgacgcgctgctcgatcttccacatctcatccgggccgaacttgtcggtgtcggtcagcgtgctccacaacgagtggtagcggtcgaccagacggttgcccacctcgatctcgtccacgtcgctcggcagcagacggccagaagccaaatccatcaattcaccgatgatgttggtgcgagccaagtcgatatcgtattcacgctggccatcggtaagctgcacctgcaaatcaccggtttcggcgtccaccaggaaggcggaaaacgcgtcggcatcacgcaggaacaggacgttcgacagcgacacatcgccccagtagaagccggccaagtgcaggcgaaccagcagcacggcaagggcgtcgatcaaacgctcggcagtatccggctggagattgcgggcgaacagcgcgcggtacggcagtgagaacttcaggtgacgggtgaccagaatcgcttccagcggttcaccgttgcggtcatgacgaccggtgaccacggcaatcggggtgacggtcggcaactcgagcttctgcagtcggcgcagaatctcatactcgcgctcggccacctgacgggtgatctctttcatggcgtagacctcgtcgcccacgtgcacaaaacgcaccacgtggcgggagatgcctcgcggcaggttggccagcaggtcctcgggccaggtggccaggggcttatgccagggcagcgtgaacatcttcgggttcgagctggcggcggtgatcttcaatgcttgcggctcagctgaactggcatgttcgtcttcggctttgacggacgtggccttcagcgcgcgcggatccatctgaggcaaatcgttcaactccatgtgttcgattctacgtggtgcttgggaagtgcagcgagtagcggcgacttcggcgcgttattctcgcatacgaataaatcatctgtatgggatttgccggccgaattgacgtcccgtatgcggcgcctcatgcgcaatctgaacaaaatgaacgcaacaagtaacatgagccccgctgccgcggcaatgctgcctacggcggcacccgtacgaccgataaggccaggattgcccggctcctcgctcgggttatcttcgggcgggacaacaggagttccagtgctaaatttcggctctactgtgatgttgagatcagcggatgtgcctccactgccaggaatcgagatgaggaacggatcacagtcgtatgctttgttggctttcgccgagctcgtgcgggagaccagatataggccgagcggcagattctggaaagtgagctgaccagctacgttagtggtgccggaatgctggtacagcttgtttttcgccgcgtgcgcagcgagcttcttggcagcatcgtgatattcacttgatgtcaggcgttcccaatcggcagtgaggccggaaaaatcgccgacggttttatatgaggagacgctaccatcattgttcgttgtgacggtggcgacgcgcacgatggaataggtatcgccggcaagcaatttaggcgaagccgtgtctcggccccatacggcattgatggtgagagcgccgaaagaatcagcttgcgcatacggcaccatagagccgaaggctgcaagaacagtgaggacgatagtaacggcggcggcaatcatggcagcaatgcgcgccgcaccatactcgcttccgctatgcaggtctaacatgtctgcccggtcctttccgccatgatgaatgtgattggttatttgtactgtctggctgaggaggcaagtcaccgtccggctcgatatccgcagagtcagaatcaccagatgcgaccttggtgctcccactctgccggcgtcgccgctcatggcgctgccataaatgccatgcgatgagcaaggcaatcagtgcaagagacggcaacaagtactgcagcggaatgtccacgtggaacgtggatttggcgtcatcctgctgctgcggcgtgtatgggatgcgatggccacgcaccagcagccgatgcgtattgaccgcatacggcgtacaagtgatgagcgtgaccaaatccttgccgggctcaattgccagttgtttggtatcggtcggcagaacggtagtgatcttatcgacctgatacgcatacgtgtctttaagtattgtgatgtagaacttgtcgccttttttcataaggttcaagtccgtgaacagttttgccgtgggcaagccccggtggccagacagcgccgcatgagtggacgcgccaccaactggcagtgaggtctgttcgagatgtccgatgccggattgcaacactttctcggaagtgccgtgataaatcggcaaggtctcctcgagcttaggcacagtgatgtatcccatcatgccgtcaccgtcaatattgagcagactgttgtattcctcgtccgtggatgcggaattgacggcactggcaagagcgtcggtctctcctgcatcgttctgggcgagcttttcgttataggcgtgcgcagcatccagcaccttctggtactgttcctggctcaatgcttcaacgctggcgtcgtagttatttacggcgcggctggcgttgcgcataatgaggaagttgctgatcgtcggatagaacagaatgagcattccaccgagaatgaccagtaagggcaggatgttgcgcagtcgtttcatcgagcgttcttttcgcgaggaaaccgtgttgtgggcgtagcgggtgtgtgcccttcacgcccaaaacacggccatgctcgtcaggcgttcttgcgcttgagagtccaggcaacgccgagcgcgatgaccagcacaccaatcaccgtgaaggcgatggtacccatgccaccagtgccaggcaggatagcaccggacttgttctggaccgggatgacaccgttcgatgcgtgctcgccgtagtcgttgccattgtcgttgttgtaggtgatggtgacggtggcattcgtggtgtcagtgccgttgttctggccattaaccttcacgccgatggcactggcgagcttgttgtagccggccggcgctttggtctcggtgagcgtgtactcgccgttctccagtccccggaattcaaccttaccgtttgcaggagtggtgatagtcgtcgtagcacctgcctcatcagccttagctacacggtatacagcgttctgggtcgcactatcagcgactttcacgaagctaatagcagtgccgcccttatgtgcgagtgtgaactcagcaccagcaagtcgagtagcggtatcatcataatttttaccagtgtacttatcgacggtgaagccataagtgaagacacgaaccttgctgggttcggactcaccggtgccattggtgctcgggttgttggagtactgaatcgttgcggagttgacgttaccagcaccgcccacaacagcatccttgttcagcgtggccgtgtaggtgacggtgatcttcttgccgacattggcctgctggttcttgaagttcttcatggtgacagtaagaagcgttttgccgttgtccgcaggagcagtggcgacggtgtagtcagtgtccgtggtcagtgccgtatctccgaccttaacggaatcgacttgtccaaaggtgaggcccttagacaacgtatccttgaagttgaaggtgtaggtgttataggcggacatgtccggaatggtggaagtcagggtgaacttcagggtatcaccgatcttcgcgtcggtggcgtccttaccagtgccgtctacctgtaccttcttgtcaacggtaggcagggcgcccttaatgtcgacactcaccgtggtgctatgaacgcgaactagcgcggcgtattgactattggtgtcagccacggtcgcacccggcacagcgaccacgtagtagccgtagtcgagaccagtgaacgtcgcagtgtacttaccgtccgtggcagcaatcttagataccgtagcggtcgcgtcagccgtgatgctgttggccgtgttctgcgcccagttcgatgccttggcagcgaaagcagtcaaggcactatctttcagcttggacacgtagtcgtttgctttatcgttgacgttcgcgtcggtaacatcagttagtccgacggagttcttgaagaacggcttccacgcgtcattcaacgtgtgggagacagccccgccgtcactgctcacggtggcggagaacatcttgtaggcgttcacggtcttaccggcgaacttcgcgtctttagtgctgaccgtcagcgtggcattaccacccgctgcgttggccgtggcgactgtcgtcgcagccaatccaaatacggtggcaatcgccgcggcggcagcgaaaacctttttcatcagtgatttcattactgttcctttctctagatggaaatcttttctgtttggcaggtacggtttgtctatgtggtcgtcacgaggcatgggcacctcgctttcgtatacggctggagcccgagcggactgtgccgaattgaacgcgttgattacgcacgtaccagaccacgccagctcccataagcagcaagccgaacatcaggaaccacatcgtgcccgcgcctcccgtatccggaagcaacgccgcattggtaacaatggccacgcgttccttggtgttgtaggagaccgatacttggtatccggcctccgcgggcttgatggtcttggtggtatcgccgtccttataggtcacggcggtttcttccacggtgtacgtgtagtaacgcacgatgtccttgccgttggcatcctgtccatccacgaatgcgaccggcagtccttgaatcaccttgcgccaggtgttgctccaggaagaggcatcagaggagtccaacgtcaccgtccatggattcctctgcgtcacggttgtgcaatccgcgccgaagcattgaatcgtctgcggcgtcaccgtattgccactgccatcggtatagtgcgcggcgatcttcagttcgaccgactgcggccgttcgaggttgccgtccttccataccttctggacggtcaggtcaatggttcggcaaccgtccttgccgcacgggtcctggccgtcgtccggttcgggggtgagtccgccgttgttgtcggtcacggtcgcgtcgagcatgagcacggccttggccggggactggtaggcatcgagcttcgtcttggtgctgccgtccgtggagtcgaccacggcgtccttaatgccgacccaagtggtgccggcgtcgccggatgcggagctgtgcacagcgctgctgtcgtatgtgttgaccacgtcgaacagcttcacttcccaacgatcgagtccggtgttcaacgcatcgtctgccttgttcttctgcgagaagatcttgttgccgtcctgtgcggaggtacgggcctcactagcgttcgcggccgccttgcggtaaatgcgataggtgttgtatgccttgccgcccttgccgtcatcgaccggtccgaggatgttgctcatggtgttgaagtcccatacggacttgagtttggtgttcgagaacgggtcgaccagtccgctggtgccgcggatcgtgtcggcgtagaccatgtggtcgtctgccagcacgccctcgtcgttcagtccggcaaagccgcccgtgtagcctgtggaaagatccttcacaccgtcggtatcctgagttgccccaccaccgaacacgtcatagccgctggcgatgcccgttacggtggactgttccacgcgagtacggttgcccttgatgagctggacggtcaggttgctgcccgacccattcatatcaatgccgtttttgttgcaaggcagtttgatgacactatcgccgatggtgacaatcgccacgtcggtctgctgctggttttcatcatcagccttggacagagcaacgctcaccttcagtccgaacaggttcacgtacagcacgttgccttccgaaagcaccttgagatcgaataccttgccgaagatggccgggaaccacttgcctaaatcgatgacgccgacctgttccgccttgtcgaggtacaggagcctgaccagcgcgttcaccacatgcagcagcagttccacaagtacagagttgaccttcgcgtcaaccaaataggcacggctggtttcaccgacgaatccgccggcaatctcaccgctagtgaccttcttgagattgtcagacgcgcagcccttcaccctggccaaatccgcgtatccaacaaaaccgcctgcgacctcgcgtccggtagccttgtcggtggctttgccgtaattgtcgccatggtgtgtggcggtgacggtataaccgtccgggatgccgatgacgcgcgaatcgccaacgtgcgagccccagatgtcaagtacgccggccgtggcaccaagcagattgagcgcatccgtgccgagctgtgcattgtcggcggcgaccgtgccggatttgccaagatgcccgatgaagccgcccacgtagttcacgccggtcacactgttgaggttggtgaccgcagactgcttcacagagccattgatcagtccaccgccgaagccaccggccgcaccggtgtaacgcttcgagtcaagcatgcccttcgtggtggaatcatgggcgacaatctggatgccgtcgctcacaccgttgacctgaccgtcatagatgaaggtgcggaatgcttcgagcacgcccacgttgccgaccttgagcagtttgagcagcaggttggtattctgcttatcgccggcctcgccgccgccgacggaagcgacgctggatatatcagcaaggccaaagaagccaccggcgtattgcccgccttcaacagcgcgcagcccgttaacagtaagagaagccgggtcattgttcggatccgcttcactgccggtgcctttggcggaatccttgtcaccgaggatcgcggcctgcaacgaaccagcgaaaccgccggcgttcagggcatacttggttgtggtgttacccttatcgtccttgctctcatatgcgccattgaccgtgtatccccatgccgggtcatccgagctcacatgcgcaccgcgaatcgtcgtaaccgtggcctgcaatacgctgaccagacttgccgggttcgataccagcgagtcgaggattccttgcaggaatccctcggatgcgttggtgtccacatccgcgaccgcgccggcagtggccacgccgataaatccgccgacattgttgcgcccttccaccttgcgcaggttggaaacgttggcaccggcagcggtgacacccttgacaagcttctggccgttctggtcgagatcgccccagatctggccaccgaccgcgagaccgacatagcctccggcattaccggtgccgtgcgtgatgtcttcgccggtggccacgaccttcatacccttgcggtagccggccacgctcgaggatttgatgactggcacgaatacctgtgccacgtcgagcatctgacccagatcaagtttgatgcctttgtcgccgaatagttggatggagccgaacgaggatgccgagccggattccatcgtgcccgcgtagccacctgccgcacgcatggcggagacggtcttgacgtccatcgactggccatcggtgatcgtgccggtgcgcatcaggccgacgtgtccgccggctacgccggaatcatgcaggttcgcgccggtccgatactccgcacgtcctgcgacgacgttgaatccgaagatgtaggattcgaggaacttgtccagggaatcctggtcggtaacagagcccgcaccatcagccgtggtcacatcggtgaattccttgccatacgcaccgtacttgccgatgttgtcgacccacgtcttccactggtcgtagctcatattgcgcagcggaccggtgaccttcgtgtgctcctcggtcgggtagaccacggacagcacgccggcgaggttgccggccttgatgagaccgccgagcaaggagagcgaaccgccttcagcggtatcggccgcttccatgaagccggtgtagccgccggcgatttcggcaccgtatacgctgcggatgcgcgcggcataggctacgcgttgcggcccgttgtatttgccgtcggtgttctcctgcttccatgctgcggtgttgttgccccagatatggccgccgcggttacgtcccgcatagccgccggccatgccgcggcgtgtggtcgtatccgatgccgcctgtgcgcgcaccgcgccgccgcacactgcggcatcggtcgagctgttgcgaatcgtcggtgtgaagtcctgcacgagcgagagcaggttgtcgaggttgacaagcttcttgagcacgctgccgtcaccgagtacgtttgccacggctcccggctgcatggcgcccacgtaaccgccggccgaaacctggccgatgatgtatacgaactcatgagagctcgagtcctgaatatggccgccttcgatgtctccggcgaaaccaccagccatacccagtggatcgggcttgttgttggcattcctatgatctgcggtgctggccagaacggagtatccgccgatgccgccagtcacatcggagtgttcaatcgtcgagacgacgacatccagcacactgagtacatcgttgagattgactttctggccgagcaggctcaggccaccgcccacagctgccgccgagccgatgtccattttgccgatgtagccgccggcataccgagcggcggtgactgcatacgagctgtctttgctcagataggtgtcgtcgatggatccggcggtttccagattcttcggtgccttgacgtcggtgtggcgcagttgggtcacgctggaatgggacacctgcacaccggaaccgtagccgatgtagccgccggcggaaccggattgcgtatcggattggtcaagtcgggtggcggagacggtgaagccgggatcgtccgggtcggaaatcttgttgccgctggtggtctccacggtggtggcatcggaatgcacacccgcgtaggagatgaatggcacatagccctgcaccacctgcaacaggttggcgagatccaccgtaccgaatttgccgagcaaactcaggccgccgttgccagccgaagcgagcgcgccggaaacgaccttgccgccgaaaccacctgcgtatgcgccgccggtcacatggtcaaggttgacaacggccacggggttggtttgcacgcgggactgtacaccggccagcgttgagtcgttcttgagatcggtttcggagaactggttgaccttgccgctttggaagtttcccgcatagccgcccgcgatatcgccttcgacataaccgccgttgacgtatgtcacggtggtatccgtataacttggaatcagatacggtacggcaccgagcaggtcgttcacggacagcaggccgcctttgatcaggccatccaatacgctggaatcttctgcgttgctgagcgcgtcggcgaggccgccggtggtggagaagcccacgaaaccgcctgccacaccatcggacgtgctggtatcggctgtgaccgatttgaggtttgtcacatggctttcccgggtcttggtgctgttggcctgaccatagaaaccgcctgcagcgtaatcggttgtttcgttgttcttgttcttgccggttgccgcaaccgtgaatccgctagagatgccgttcacgttcgatgcagtgactgcaaccgaagaatattgggcaaccgatagcagaccagaaagcttgataagcccaagcacattgagaccgccagcgccgatggcgtcgcctggtccagagaagccaataaaaccgccggcttctcccctggccgagaccgtggccagattggtaaggttcgtgtgggtcacgtcgccgccggtggcgcatccgatggcaccgcctgcataatatgaaccagccgtcactgtcaggccggatgccggagcggtgacagacatgttctccacggtgaacgcggcaaactggtcgaacttcttgagcgtggcaatatcgccaattttcaccacactgttgagcaacccagctaccgttgtcggttgcagattgccggcgatgccacccgcgtaggagcccgtggccgtgaccgattcaaggccttctatggtggtggagcgctgctgagggaagtcacgacgattgttgtacttccagaatgtgagtttttgaaggcggttctgcgaggaatcaccgatcaccgtacccgaaccttcacccacaaggccgcccgcgtaatcaccgccggcagcaactgtgaaggaacccttcatttgtgtaccgagaatcgcagaaggattcacaccgacgatggatagcagttctcctgcaccgttattgctgccgctcagcaatttagtcacagccttggtgagctgtttcaacagcgatgccttcgtggtatcgtccgtaccgagttccaggccccatcccacggaggcgaatccggtgaatcctccggcgtgggatctgtcggcagtcacggcgaccgaagccgtaatcgaatcattgacagcataggcattggccatggcaccgttgaagccgccggcgtagtcttcggcctgcacggtgatcttatcgtcaccgtttaccgtcaggccactgttttcgatgaggctctgcggacgcagcgcagacagcaagtcgacgccaagcgagttaatcagaccgcccacgttgccgttgcgacttactccggcaaaaccaccggcatattgcgttgcccgcacggtgaaaccattcgtgctcgtcaccgaagagttctcaatgattgcaccaatctgcgcaccgacaaagccgccggcctgcgggttgtccttgttgccgatcaccacgttctttttgaacccgttcaccgaactgttcgagatgaccgggttgtagtagccaaccggaatcaaggcattcagcccgagcgtgccggacagcaaccagtccaccaaatcgcccagcccgaggaacgggatgacgttcagaatcttcgagagtaacttggtgagcgctcctacgatgccggagactgcatcgtatcgggttgcgccctcaacatatcccacgaaaccaccggtcatacggcttacgctagataccgaaacatctgctacctcgcagtccgtaaccttggtgtccccgtagatacggccggcaaatgcacccgtggcgagattggagggattgtctttgtgcagggtgagcagacctcgaagattgaggtcaagatttacttgtccgaatgtcaatagttttaacgccttcaacagtgtgtcgagcagtaatcccactgccgaagtgagcgtaccgagcaaggtcggcggaatatacgattcactcgtatgattcgtcaccgacacatcctgcagcttgaggttcgacaccacggccgtaccggcgctgcccagactgttgctgttcatcacggtcttgttcgtgatcgaggcgaagaagccgatgccctgctgcttgctgacatccagctggtcgcctttgacattagagaccatatctttctgattgacgaccacatggctgatgaccggccgagctgcggtagcgtgaaccacgcttgcgccatcggcaccaacagccttccacaggctggctgcggtgtcgccgtcattggagaccgcaccgagcatagtgccggagaacatgagcggagtccactcggtgttgttggtatctgccgcgttcttggacaggtcgatgttacggaagatcaggtagttggcgtctgcggaataggtcaggccggtgttggcagcggagtagtccgtttgcgtgccatcagcacccacgccgtaatacttggtgcgggtccttccgacgtttgctatcgtgcatcccagcagtggactgtcgtcgtggtcggaggcagcagcattgcgcaagatatccgaatcggcaagatcggcgtcaccggcgtattcagtggacgacgcgccatctacccagtcgtagccaaagagtccttgcccggtgcagatctgcgtgaccttgttgatgcggccaataaccttcttgccggaaccaatcgcacgcagctgctgctcgttgccaatcagaatgtagggcttgccgttgatcgtcttggtgacctgaccctcaaagtcacggccgccaagcgccgtcgcggcgacctgcacattggccttcgccggcgattgatccgtcgcatttgaggaatcgttcttggcatcttgagaagaagcatcgtttggagcctgagtttgggctccatcattagcggaattgccagcggtagcttctgctgagtcgtccgccttattgtctgtcgcgccatttgaggattcggaaggtgttggcgcaccgtttgatgtattggcctcttctgacgtcttatcgtcaacgttgacattgcgagcagaaggagcagctacgacagtattatcccccccccccagaaattacggcgttaggagagctactcacatcgtctatattctgagcatatgctgcaggcaccatgcacacgatggacaaggaaacagcaataaccgaagcaaggcaacgcttcaaggcatggcgctgccttccagattcctgttctgttcctccgttaaacccgcaacggacgaacttcgatttcgagcccattgtttcccctcatagattcgcaatccctttttcgggaggtcactgcatacaattatacaagaagttggcccgttgtctaattgaaagtgcaacacccgttattggagattgtccagataaccagtccgaagggatgttgcacctatggggaaagtatattcgcacctgtcggaagaggaacgccaggtcatccagatcgaggtcggcaacggcacgagtgtcaggaagatagcccgtttgctgggacgcggcccgtccggcatcagcagggagatcaggcgcaacacgtggttcccgtccaacgagagcgagtcctaccggccgtaccggccgaagcgtctgaagacgggcccgtggacgggccgctactacatcgccggccccgcgcagcgcaaggccgaccggcgcagggcgaagccgcgcaagccataccgcctgtcatgcggccgcctgtggtcgcgggtggccgaatggccgggtagaggctggtcgccgctgccggtcagcggcatcatccgccgttgcctgcccaaacgcacgatcatcgaacccggtatggcaagagggctccaggagatcgtcgacgagaccgacaaccgtcccatgcgcgtgctcggccaccgcacgcccgccgaggcattcgccgacgagctgctaaacttgcaagacaaacaaggatgttgcacttctaaatagacaacggggacagaagaacaaaaagttcatttgcgggggccggttagcgtatgtctttctgggcaaaaagaaaagccccgcaactacgcggggcttttccaacgaggccataagagaggaagagaatcgcctcgtttaatggttggcatgaccgaagtcataccaagtatctgctagttcctctactagttcagacgcaactcggtcgacggagcgaacaggtgcatcttggaggggtcgatcttgatcttgacggtctggccgatcttcggcagcgcacgcgggttcacacgaatcgtggtgagcttgttctggtcggacatcatcgtggacgcctcggcagcggagccatcggtgatgatggtgccgtagatgtagccgtcggagcccagatcctcgatgttctgaaccttcagcgagaaggcgttcggatcgtccggggtggccagcgtggcatcctcgggacggaagccgacgacaatcttgccgccatcctcagcggtcagcttgttgacggcctcggcgggcaggtcgacggtgtcctcaccgatcttcgccttgccgttgacgaccgggtgagtgttgatgttcatcgacggggagccgatgaagccggcgacgaagacgttggccgggcgatcgtacagctcggtcggagcgccgacctgctgcaggacgccgagcttgatgacggcgatgcggtcgcccatcgtcagagcctcggtctgatcgtgggtcacgtacagggtggtgacaccgagctgacgctgcagggcagcgatctgcgtacgggtctgcacacggagcttggcgtcgaggttcgacagcggctcatccatgaggaagaccttcggctcacgaacgattgcacggcccatggccacgcgctgacgctgaccaccggacagagccttcggcttgcggtcgaggtactcggtcagatccaggatctcagcggccttctcgacgcgcttgcgaatctcttccttcggggtgccggcgatcttcagggcgaagcccatgttgtcggcgacggtcatgtgcgggtacagagcgtagttctggaagaccattgcgatgtcgcggtccttcggctgcatcgtggtgacatcattgccaccgatgaggatgcggcccttgttgacctcttccaggccggccagcatgcgcagagtcgtggacttaccgcagccagacgggccaacgagcaccaggaactcgccgtccttaatgtcaaggttcaaatcatccacagagggcttatcgttgcccgggtagatacgagtgacgtggtcgaatacgacttctgccatgatattcatcctttcagaggcaggtacgtgcctcacgatccgttgtaaagggattactgtgccttgatcatcagtccctacactggcaacgtcaaaccgcagcgttcttttttccttcggttcattgaagactctcttcgttgagccacgtactactatacacgtccgctggaacacgtcaacacgcgcgtctgaaacgcggacgtaacatcgacgggccttcaaccggcatcccgcagccggcattatccttactccggcctcatctcagtccccctcctcccatccatctcccgcctctccccctccccaagtcctctcctctttttgcgttcctaagtgcgcgccgaaacgacgaccgtgcgcacataagtacgcaaacagggccatttgcgtccgtatgttcgcgcacttgtcgttccggcgcgaacttaggaacgcaacggcgcttccggctcaatcggcatgctcgaatatcgggtgcgccccagcacgcggcacaccggcctgcatcagcttcatgacgaacggcgcgcgctggaccacttcgatgtaattcgtccgtatcacaacgctcactccggcctctttcagatcctgttcgcgctgcctttcgtcacggaccacctgccgaacatcccggttcgacgtcatctctggatcgatgtatttctgcataccgtcaaactccagcacgatgatgcggccatcttccgtatgccagatgaaatcgacccggcccgcctccttgccggtcacgcggctgtaaaacgtatgctgcaattgcggaggaacaaacccttcttcgatggatacagcccggcagaacgactctcctccgttctcgctgcgagcatccgcataatgcagcagacgaaataccggcccacaatccactcgcagaccatcacagacggcgacgatctcctcgcgggtcacgagcccccggcgcaacgcggaatcgaacatcgacagcacgtgctcgaacggatacaagagcgcgcagtccaccaaggttcttgccggactggtcacacgtacctcgccgatacatacattgtcacgcaatgcccgttcgtgggcgatccggtcagccaacttgctcacctgactccaggtattcgacccgtcctgcgctgctccatcaccgcgaggccggtacaaacggaccacacggcagtcctcccgtatatcggatctacgcaccgagatgcgccgcagccggtggtacgaccgacgtgacttggtgaatccgtcagtcgcgatgtacacgtatggctcgtcatgcagcgtccatgagtgctcgaacccgtagatgaccgccgcgctcagtccggcgaatacgcgctcgggatgccgtctcgccatttcgcgaatgacatgtgacgcttgctcaatgggattcagaccatcccagtattcacgacgcgcgtacacgctgcgaaatggccgcacgacatcgccgcaacgagttcgccgcagcatcgcctgtcgttccgccgggctggacgcggaacagcatcgcccgtccatttccgcccggttcatcagatcgtctagatgcttgtgctgtctcatatgttgatgatgacaatatggaccgccgctgcgcaagcgaatccggggtatgtggtcgaaggctaggcgattgtggataactcggcgcgtcgcggcggcatcaacggctgtgacgacacatttgcgttcttaagtgcgcgccgaaacgacaagtgcgcgaacttaagaacgcaaaccggcccatttgcgtttctaagtgcgcacaatcgacgtttcggcgcgaacttaggaacgcaaacgatatcagggggggtagggagtatcggaggggacagcaggggaaggaggaatatcaggggtagagagaacgggcacaggacggtgagtaggataggagggtatgagcgatgcgttgaacttggagcccggagcgttggtcggcggctacacgctgatgtcgcggctgggatccggagccatgggatcggtctggcgcgtgcatgatgacggtggcgaggaatacgcgatgaagatattgcgcgattcgctcgccgatgaccgttcgacggcgtccgcgcgcgatcagatcacggcacgtgagcggttgcgccgagaggcgatggcgttgaagaaagtcaatcatcccggcgtgtgcggcatcgtggacatggagttggatgattcgctggcgttcatcgtcaccgagctgatcgagggcaaaaacctgcgcgacgacgtcgccgcgaatgggccatacgtcgccgatgacctggaacgactggcatccaagctgatggacgcagtcaaggcggttcatgcggcgggcatcgtgcatcgagacatcaagccgaccaatgtgatggtttcggcgaccggcccggttctggtggatttcggcatcgccatgggcgaaggcgaaagccatgtgacgcgcaccggcctggtgatgggaacgccggggttcatcgcgccggagattatcgagggaaccgaatccgatgagatcacggactggtggtccgtgtcgtcggtgctggcattcgcggcaaccggggagcccgttttcggcaccaagccgatgatggcggtgctggaacgcgaggcgtccggcaacgcgaacctcacaggtcttcccgtcaccaccatgacggcgttccgtgcggcgctgaacccggatcgcagcaagcgctgcactccggagcaactgctgcaggcgatcaccgtggacgcgttcaaccccggcgcctggcagcagtacgacgatgacgccgcgcaatccggtcagacggatgtgatgcgcccttttgaacataccggcctgcgcaacccgcgtctgttatggcacccgcatgagccggccggatcaggtgaaaagccgactgcagccgtcaccaaggcaggaatgccaaggcaaaccgcgatgcccggcgttcggcccgctttgcagcggatcatcggacaatcggcgccctcaccgtatgcgacggttccgccgattccgaggctcccaaacgccagccaagccgctgacgctgcatccgccagtcttcgacggctaccatcaatcgggacaggagcagatgccggaacctcggacggaaccgtaccgctccgggaagcaccgctaccgggaaatatcgcgtcttctcaggcacccggcaacgaccggacggcgccgatgtcccgcctcaccccacctatgccgccgaccatgccggtcggcaccgaagcgaccgaatcgttgcgcccacagccgacatcggttctgctcacctccaccatgccattcgattccacggtcagcgtcggacgaaccatgcccatgcaaccgcagccgacgacggccctccccacggacgatgcggacatgaccggagcaacggccgtaatcgagccgtcatcatccgccgacaccgcggcaaccatggcgatggatgatccagtgtggtcggggcgcccgcaaatccccaccatgaccatgccgccgctgagcccccagcagatcttcgccgaccctgatgaagccgcaacgccgacgaccgcaatgcaacccggccagcccgcacagctccagccagccgcacaattccagccgtccatgcaagccatgccgacagcgcaggccatgccgcccatggccatgaacccggcagacatcaagcgccagacctatctgcgtcaaggcacgccgctgctcgccgcatgggcagcgcccatagccgcaatggccgcgagcatgccgttggcggcaatggtcgcagccacgctgctgtgctggctgctgctaacgataggctattcgacagacgcccagctgcaacgcgaatacagacgcggcggcacacacagcgccggcgacaccgcgatgcgcatcatcacgctgccatggcacgccctcagggggttgcctgcggcaatagggcgcggtctgctcgccgtcgcgacgctggcgctgggatccaccctcgcgacgctgatcttcagtctgccggtcgtaaacacgcggttcgccataggcggcatcaccattgtggttcccatcatcgccgcctcccccgtgtccccgtcaggtctggctctgtccatctgcgcggcgatcagctggatcatcggtatgctggcgcccgcgccgaccatgctgcgacttggcaccggcaccctgctcggtctcaaccggcccgcgggctccagcggcgcaggcatgctccccgaatcgtccaacaacgaaaccgctcccgcgatatccgcccaacattccgggcgtgaattcgccgtatggatcgcatgggcggtgattacactctcagcgtgcacgctgctcggtctcggacaaggcatcaactggtggccgctgccctccaacgtcgcataacatccccatcccagctgcatgccgagcgacggcaatgcccggtttgtagccattgtcacgttccatcatgcggcaaacggcgcaacccgccgccggaaaagcgaacccttctactactatgggcaacaaaccggcaggaaagggataactgtggcacaaaagaatcagaacgcgaagcgcaacaccagggcaagccgtcgcgccgccgaagagaaggcggcgcaggagaaggcggagcaagcggccaaggagcgcaagcagcaaaccatcatcggcgcggtggtcgtcgccatcatcgtcgtgctggtggcaatcgccggcttcgccatctatggagccattcacaagaacgacgtggcgaagagcaccaccgaggagcaggcataccagcagctgcaaaaggtcgagaccaagccatcggcggccgacgacaagggcggcatcctcatctccagcgaaggctatggcaagaaggtgtccggcgcccccaccgtcgccgtgtacatggatccgctgtgccccggctgcggcgagttcaaccgccagaccgatcccacgctgatctcgctggtggacgcgggccagatcaacctggaaatccacccgatgtcgttcatggacgaatactcgaccgacgaatattccagccgcgccaccggcgccatcctgtacatcgccagcaatgacgacaaccccgatcacctgctcaagttcatctcgaacatctacgccgaggacttccagcccggtgaggccagcgaatacaagtcggtcaagaacaaggcgctcaagcagcaggcgattgacgccggcgtaccgcagtccgtggccgacaaggcgttcaacggcgaatacaagaaatggatggatgccatcaacctgtacaccccgaagcgccccgaactgtggcaggtgtccggttcgaacaagggtgtcatgagcacgccgaccatcaccatcaacggcaattactgggatcgcaaccagctgtcactcgccggcatgaacaacaagaccggcatcatcgcgtcgctgggcctgaaggaagacgaagtcggccagaagggcacgatgccgtcgatcggcgaatcgggcaagccgatctcgctgacgaccggcgaatgacgaatgacccgtcatgccccgcaaatgaacgatgacacccacgtagacccgtgtcgcgctgtgatcttcgaccccggccggaggaaccgcaacacgggtttgcgacattctgaattgaccagcgcggtgaaactggtaagctggtcaatcgttcgatgacacctgtccgcattgtgcgaatggggtccgcctccttagctcagatggccagagcggccgccttgtaagcggcaggtcgtcggttcgatcccgacaggaggctcgcggcacagcataccgcgtgtcatgtgcgatgcacggtcgacatgtagtaagctgtgtttacatatagtcttaccttgtgtaagtgccagaagccttcccccaacttatggcttctggaaggcagagcgtcccccaattagctctgcccacaggggggcgggacaatccccttctctcccgcccccttcttctttattttgatatatatggccaccccagtagctccgcgacagcccttcgggcagggcaaaaagtaccaaatgtgggagtatgggtgacggtcgtgcgatgcccagcgaagcatcatcgtgattggttacaatgctagccgtagctcatggaaggatgacatatggccaggcggtggacaccacgacgttttgttcgattgcgtcgcattcgggtggcgatctgcgccgtcgccgtggctcttgcctcaacggtcgcattcggcgtcgccgcacgcaagaccatcgcactcagcatcaacggcgacacccagaccgtcaccacgtatgccatgagcgtgacgcgcctgcttgaagagcggggcgtcgacgtcaaatcccatgatctggtgcaatccaccagcggcgacatcctcagcaatcatgacgtggtcacggtccgcagcgcatatcagacgaccatcagcatcgacggacagcgcgtgccgttctggaccgtggcgaccagcgcctcccagctgctcgggtttttccagcagaacgagaacgaggccgcgaaagtcaccgtggacatcgacaacatctacagccagctcaccggcggcctcgtcatcaacgagtccggcccggtgacggtcatcgccgacggcaaaacgacggtcgcgccgaatggcaagcttcccgccgcgtcgattctcgattccaaaggcatcagcctcaacaaggaagaccgcgtcagtgtcgagaaggacggagacaagaccgtgctgcgcgttcagcgcgtcacccacgggcaggagacgacgaccgtcgccattccccatggttcgcagacgattgttgataagtcgttgaagccaggaacatccgtggtccgccaacagggggaagacggcgagaagaagcaggtctataacgtcacgtatgtcgatggcatcgcagagacgcgaacgctgatttcggagacgaccaccaaaatctccctcgacaccatcgtcgccgtaggcccggagaaggccgccgaaccttccgacaccagcaaggggcaagccgataaaggcagtgacaacgccggcaagtcaggcaacaagtcgaataccggcaagtcggatggcaactcctcgaatggcagcacgtccggcgcaaacaagtcggatgatacgtcgaacaatgacaaaaacaacgacaagaacaacgggaattcgggcaacaacggcaattccgggaactcagggaactcaggcaatagcggcaactcgggaaactccggcaactcgggaaactcgggaaactccggaaacaacggcggcaacggcggcaacggcaactccggcaactccggcaactccggcagcagctcgcagggacgcctatggcacccgaccgccgcgcaggccaaagcctacgcatccggcgcggccgcacagcgcggctggaccagctacgactggacatgcctcgacaagctgtggacccgcgaatccagatggctgtggtacgccgagaacgcgaagaccggcgcctacggaatcccgcagtcgctgcctgcgagcaaaatggccgagttcggcgcaaattaccgtgacgacggcgctgtgcagatcgactgggggctggcgtatatcgcccaacggtatggcagcccatccaaggcatgggaacgctccgaacaaatcggctggtactgatagcgagcgttatgactgacatgaatccatcccctgcaccttccggagcatccgcagccgccgagaaacccgcagccgccgggcgactgctcggcgcggccgacatccgtcacatagcagccgaagccggcatcagcccgaccaagaaattcggccaaaacttcgtcatcgatcccggaacagtgcgccgcatcgtgcgcgaggccgcggtcaccgccgatacgcgggtgctggaagtcggccctggattggggtcgctgacactggccatcctggaaaccggcgccacgatgaccgcggtcgagatcgacccgccggtcgcgcaacggctgccgcataccatcgacacatacatgccggatgcgaggaaccgcctcacggtcatcaacaaggacgcgctggccctcacgtcggcggacctccccgagttcagcggcgacgaaccgttcaccctggtggcgaaccttccgtacaatgtggccacgccgatcatcctgacgctgctggaacgcttcgacatgctgacgtccttcgtggtgatggtgcagaaagaagtcgcggaccgtctgaccgccactcccggctcgaagatttacggcgcgcccagcgtgaagctggcgtggtacggctcggcggaacgcgtgggcaacatcgggcgtcacgtattctggccagcgccgaacgtggattcggccctggccgggttcacccgtgtccagtcgcatgcgggcccgcgcgacccccagttgcgccagctgacgttccagttggtcgacgcggccttcagccagcgtcgcaaaacgctgcatgccgcactcaagcgcatggtgcccgatgaagtgttccacacggcgggcatcgacccgacacgccgcggcgagacgctgaccatcgacgaattcgccgctctggcgacggcgctgaggcaatcgcagcatgaacaggggcaggcatcatcatgagcgccacagcaatggacaatgtacggtcagcaacaccgggtcaggtacggcgttcgccaagcgtccccgcgcattggcccatccgccgtcatgtagcagccgcggaaacgacaccggccgggccgctgcactcggtggaggtcacggttcccgcgaaaaccaatctgacgttgcacgtagggcccgcccatgaggaatggggcggacggcacgcgctggacacgatatattgcgccatcggcgtcaacgacgtggtgacggcgactgccaagacccccggcagcgggttttcgctcgaactgagcggcgagcatctgggtgatctggcatcgagcggcagcgacatgcgccgcaaccatgcggtgcttgcgttgttcgcgatcgccagggccgcggggcgggagccggacgtggcgctgcatgtggacaaacacattcccgtcggcgccggattgggcggcggatccgccgacgcggcggcgacattgctcgccgtgaacaccctgtggggactgcactggccgattgaacggctgcgtgacatcgccgccacgctcggcgccgatatgcccttctgcctggagggcggatatgcgcatggcaccggtttcggcgaacggatcatcccgctggaggatgattcatcgtgcgttcagacgctgcgagaccgtggattcgccggccaattgctggtgggagcgtaccgtgcgcaactgagcacgccgaatgtctactcgaccttcgacaagttgggcgcgggagacggcgacgacaaccatctgcagcgcgccgcggtcgccttgcacccccgcagcggcgaagccatcgaagtcgccctggccgccggggcatcccggtcattcgtttccggctccggcccatcggtcatcgcgttcgtaccggacgatgccgtcgcccgccgcgttcgcaccgcatgggagcaatccgccacggtggatcgcatcatcgctgcgcaggcgccggcgagaccggtcataaccgtcctgccatccctgtcttatcgcgtcagacagtgacgctaatctgtgtaccagtctcgtaagaaaaggacggacccatgactcagccttatgacgaacgcgcggaacgcaagcgttacattcgccgccgccagcagatcgtattctcctgtgtcggcgcggtgcttgccgtcgccctgatcgtgtcggcgctgttctatttccatgtcgggggtctgggcataacggccacgtccgcagtcaagccgaattacggcgtgcgcgtgccctgctcgaccaaggacgccaacggcaagaaccagacatattccaactatgcgaacgtcaaggtgcgcgtgctgaacggcaccaaattcgtcggcttcgcgaaggccgtcagcaccgcgctgtcgaaccgccagttcaaggtcaccggctgggacaattacaagggcaagaaggtcgagcgcaccacaatctatttcggcaagaacgccatcaacgaggcgtacacgctgaacacgaacttcacggacgcggtgatggtgatggatgaccgcgacgacaagctgattgacgtggtgctcggtgcctcgttcaacgatctggccaacaaggacagcctgccgagcggcgacaccgccatcgaaaacttcgagggatgcgtgcccgtccagtcaatgggcaccttgcccaaggccctcgatcatgaaaaggtggaatgacggccagcatcgtcatgacggcctgaaacccccgatattcggcggctgcctgccttacgcggacagccgccgaaccgtttcttgggcgcgtttacagcgacgcgtgccaccgcttgagctcggccaccgcggtgtcatggtcgaccggaccgttatcgagccggtattccagcatgtgcttgtatgcgcggccgacctccgggccgggagcgatgccgaggatggtcatgatctcattgccgtcgatatccggccggatggcgtcgaagtcctccttctccttgagatcgcgcacgcgctgctccatctcgtccatggcggacgagaacaccatcgccttgcgacggttctgagtggtcgcgtcggcgcgggtcagccggttcagccgctcatacagcggaccggcgtccttgacgtagcgtcgcacggcggaatcggtccacggttcttcgacatacccgtggaaccgcagatgcaggttcactaactcgctgacatcctcgacgagatgatggtcgaaccgcagcgccttgagccgtttgcgcgtcattttcgcgccgaccgcatcgtgatgatggaagctgaccttgccgccgggctcgaaccggcgtgttttcggcttgccgatgtcatgggtcagcgcggccaggcgaagcgtcaggtcgggagcgggcacggggccttccggcccggtctccagcgctatggcgcgatcgagcacaatcatcgtgtgctcgaacacgtccttgtggcggtggtgctcgtcgatttccagctgcagggcgggaatctccgggaatacgatatcggcgagacctgattcgaccagcgcttcgacacccgccctcggacgatcggacagcagcagcttcgtgagctcgtcacgcacccgttcagcggatacgatgtcgatgcgatcggtcatgtcgctgatggcggcagccgtgtcgggggcgatgctgaacccgagctgtgcgacgaaacgcacggcacgcatcatgcgcagcgggtcgtcgtcgaaggactgatacggatccaccggcgtgcgcaatacgcctttagccaaatcgctggtgccgccgaacgggtccacaaactccagctgcggcacgcgcagcgccatggcgttcacggtgaaatcacggcgggacagatcgccttcgagcgaatcgccgtagctgacttcgggcttgcgggattcgggatcgtacgtgtcggaccggtacgtagtgatctccaccttgacttcggtgccatcctcgcgccggcgcatcgcacccaaagtgccgaatttgcggcccatatcccagaaaccgtcacgtccccaatgacgcaggatcggctcgaactcgtcgggatgggccgacgtgcagaaatcgaggtcgtgggaacgccggtgcagcaacaggtcacgcacggggccacccaccaacgccagctcgtacccgcgagccgcgaacaggtgtccaagttcaatggcttccggccaaacttcgaaattcacacgaggcctttccataaagtattaccgcttttatgcgtattcaagcataccgttaccccacctgcacacggtattgagtaaggtggaagtcatgattacgcccgcagacctcgcgcgcatgcttgcgcatgctgcgggcgaccatacccaaaatccgctcgaacccgatacgttgctctatacgtccgaggctccgcgcacgccgaaaaccgttgtcaggccgccggaaccacgctttcccacgcctgcgatgatgccgcagcgacgggcgggcgacgggccgaccacattcgcgtcgctggacgctcaggagctcccggtggtgcgcgaatactcggccggcggcctggtgttcgacgagcgcggccgtgtggccatcatcgcgcgacactcccgcaacggccatctcgaatggtgccttcccaagggccatatcgaaaagggcgagacgccgcagcagaccgccgtgcgcgaggtgcacgaggagaccggcattctgggtgaggtggtcgagtccattgccaccatcgactattggttcaccggtaccagccagcgcgtgcataagctcgtgcatcatttcgcgctgcgccagatcggcggcgacctgacggtggagggcgatccggatcatgaagccgaagacgccatctgggtggatttcgatgatttggatgacgttctcagctatcctaatgaacgcaagatcgcttggctctacgcaaggaaaatgaagcagggatgatcgcgaacagccccgagcacggtcaggccgtgccatcgttatctcaccgaacgacacgcctatggcgcttctttaccatcatgttgctgacatgcgcgatgctgttcgcaggccgcatggtaccggccggcacggcacatatggcgatggcggatgacgagacggacacggccacgcagacgaccgccttgtcgatcaccgaatcgacgcccgtggtcaccgacacatccggctaccacatcaccatcagcatctccaatcccacgtatgccgcgacgtcaccgggcctggtgaccgtggcctacaacccgtcatatacgttcgtatcgcgcactgacatccagcattgggcgaccggggacgtatcgattccggtgcgcaccgttctcggcacggccacggtgccgtccatcgcggcgagcaagaaggtttccgtgaagatcgacgcggcggccgacagcgatgcgttgaaggcgttgcagatgtgggggccgaaaccgctgctggtcacctatcaggcgacccaggcgaccgattctcaatccacaggctcctctgacgggtcatccgggtcggaccgtaccgtcgatccgaacaccaagccgattcgcctgcacagcttcctgaccagatcatcccagggattgcgcaacgcacagaccccgccgatggccatcaccatggtcatgccgttgatgaacaacggccagcaggccgacaagaacgccatcgaccagctggtggtgcatgacaacggcgatgaatccgacacaaaatctacacaatcaggtggcggcgtcacggatgacagcacagacgacggctccggcaacaataccgacgacaccgaaaacaccgcggcgacgcaatcatcagtgctcaccccgcacgacaatgatgcactcgccgccaaactctccctcatcggcaagcacagcgatctgcagaccatagccgatccgacggcattggcttccgacaccgggcaacgcatcgatgccgtcatgcagccggccggattcgacatcaccgcctatgccgcgatcaacaacgtccggtcgtacgaacaggccggcgtcggcaccggcgcatggaacgcacgatccgcactggccgcggcaccggcatcatccaattccctgcccatcgcctggcaaggcaagggcgattggacccggcaggcgctctccacggccaggaagcagggataccagtacgtcatcgccggtcacgacttcgactccagcaccacggccaccgtgcacacaggcacatacacaatccccacctcggccggcgacatcacggtgctgagcgagcagaaggaactcggcgacctcgtcaaaggcaagcccaccagcagtgatgcggacggcgagaccagtaacgcgggacgcatcgcgcggttcgtcgcgcagagcgccttctatcagatggagcagccgtatgcggcgacgaaccgcaacctgctggtctgcttcggcactaatatgtcggcggcgttcatcgacacgctgatgaccgcggtcgaacagtcctcatggctgcagctcaccgacctgaacgatctcattgacgcagacgcctatcggaccggcgacaaggcgctgcaaatcgtcccccaagacagtcatttaagcgagcggaacacccgatcggtcacgtccgcgctggaatcgctggccgaaagccgcaacgacatcaaccgcttcgccacgtcggtcctcaccgaccataaggcatccgcgtcctggatccgcaagatcaaggccgcacagagcacgctggcactgcatgcgctctcgtccgcgccgcgcaacatcgacagtctggtcgacggcgccaaacggctcggcggaggcatgttcggcggcgtatccatcacgccgaccgactccatcaccgtcgtcagcgaaacggccaaaatgcccgtcaccgtcaggaacaaccatccgtatccggtacgggtgaaggtctcatccctcaccgactccatggaaatcgtcacatcgcggttcactgaggtcaccataccggcgaacagcgaggcgcaggtcacgttcgccatccgcgtcgccacttccggccacgccacagcccacatcacattgctggaccgcaacggcgacacgttcggttccgcacagaacaccgacatcaccagcgtgctgcgcatcagcgacatgaccggattcatcatcatcggcttctcgctgctgctcggcctggtcggcctctggcgccaattccatcgaaagaaggaccccgacgaatgagcaccacggtaggacgcaattcgctgatcatggcgtgcggcacggccgcgtcacgtgtgaccggccagatccgcaccatcttcctcgtcggcgcgctcggtaccaccggtatcgcagccaacgcgtatcaggccggcgcgcagataccgcaggtgatcttcaacctgctgtccaccggcgtgttcaacgcggtgctcgtgccgcagatcgtgcgcacgctcaagcagaaggacgcggatgagcgactcagcaagctcatcaccttgtccatcgcgctgctgctggccatcacactgctgatggcgtccggcacgccactgctgacgatgctgtatctcgactccagctggacgcccgcgcaaagggcgctggcgaacgccttcacgctgtggtgtatgccccagatcctgttttacggcctgtataccgtattggggcagatcctcgccgcaaaggggcgtttcgcgacgtatgcgtggagctccgtaggcgccaacgtcatcagctgcatcggtttcggcgcgttcatcatgctgttcggcaacgcgggacggcagccgatgtcgttctggacatccggcaagatagccctgaccgcgggcgcctggacggccggcgtggcgttccaggccctggtgctgttcattcctttgctgcgttgcggcatccactaccggcctcgctggggactgcatgggctggggttgcgttccatgggccaggtggcggtgtggagcatcgccatggtgctgctcaaccagctgatgggcatcgtcaattcgcgtgttaataccggcgccccgaccgccggcggcgatttgtacggcatcgcgggcaacgcgagctatcagtacgcgtacacgatatacgttcttccctattcgatcatcgccgtgtccatcacgaccgcggtgttcccgcgcatgtcccgcgcgatcagcgagcatcgtatcggggatgcccgcgccgacctcagctcatccctgcgatccaccggtcttgcgatgttcttcttcaccgcggtcatgattgccatgccggtgccgctggtgaaggcgctgattccgtccacgaatgtgcatggggcgattctgatatccgggcctctgatcggtctgctggtgggattggtgcccaccagtgcgttcctgctggtgcagcgcgccttctacgcgtatgaggacggccgcagcccgttcctgttcgcggcggccgacaacgccgtgcagttgctgcttctgctgacctcgctgcgtttcgcgccgccgaaatattggacgctcatggtggctctgtcgctgagcctgtcatatatcatcacgttcccatgggtgttctggctgttgcgcagacgattcggtgggcggatcgacggcaagcgcatcatcatcatgcatgtcaaggccctgattgccggtgcggcggcatgcgcgtgcggactattcctcaacccgctggtcacgcgtttggtcggcgcgaaggtttccagcgtcaacggacatatgagctggtggcaatccatcgtcatatgcgcgattctggcgattgtggtgacggccgcgtatgccgggctgctatggctgatgcgcgtggaggagttctccagcctgatcgtcaccatgaaggcacggctgttgcgtaggacttccactgcgacatcggtatcgacaccggctgagtcggagaccgaggaagctcaggcacaaaacgcggaggtcgaagagggcaccacggcaattgcggagaatgataatcattacgataattattcgctgggtgacgatggaacctcggagaatgacggttccgcggaacgggccgctgaaactgtgaccgatctcgaacggccggttcagaaccagccggttcaggaccaacccagggggattccgtccgacaaccttccgcccagcttcgcgccgacggtcaaccgtaagggccaacgcccgtccatcaagtccgtcgtactgccgaacgtcgcggcaaacgcagccggtgcagcggcaggtatcgcggccggcaacaacgcccagccgcgaattcccaccatactgccaacgccgcatcattccactcgtcaagccgcgtccgtcgcggctgcacagccgaccatccccacggctagaatgtcagcatcaccactatctcagcgcatgacagcagagcacggagaaacaactactatgaagcctcaattgggagataccgtcatcggtcgctacactctcgtttcttcgctgcgcgaaagtgacggattgagcgcatggatagccaatgaccgcatgctggcgcagtcctgccagctgttcatcatcaccgacacatccgttctgccgcagatcaacgaggcggcttccacgctcgcgctggccaacagccggtactgcacgccggtgctgcagctgcagcacgtcggcgatgccgcggtggtgatcaccgagccggactccggtctggcgctggcggaatacatgcagcgttcgtcttcctcgttcctcagctacgacgcgattcgatcgatcgtgggacaatgcacccaggcggttcaggagctgttggacacggggctgacccataccgcgctgagcaccgataccattcgcgtgagcgtcaatggcgtgcagttcgccgacactcccgtcgccgccgcattggccgatatctgcagcggcatcgacggcgatgtgatgtcgtatgagcagatggcgacgcgacagctggccgcactgctgtacgcgctgctgaccaagacgccttcaggcacgaacacgacgttcgacctgaatatgctgcccgccgacgttcccacggaattccgcgtgatctgcaagcgtggactggctctgcacaccgaagatggggaaatcatcgtgccgatggcaacgctggccgagctgagcgcgctgctgggcgcgtgggagccattcagcaacctgtcggatcgtgacatcatattgccgtcggtcagtggcagcgcctcgatcagcatggtggcgttgcgtgacacgagcgatgacaagatcgtggaactgccggatgggctggttacctcgacgaagctgccggaattgtcgatttccgaggcgggactggcagccggcgccgaggccaggttcgtcaacgagcagcgtctcgcacagcaggcgttcctggctcagctgcccggagatccgccctcggctgatcagccggtcatccccgaagcggaattgttcgaaccggataccgccgagccgtcgaagaccctggcctccctgcaatcgaaggtcggtcagcttatgggctccttgcgcaaggacggggagccggagtcgccggtgacgacatccactgcggaagagaccgcgattgagcagccgatgccggtgtatgcaccgctgccggcatcgttcccgcccgccgccaagccgcgtaggtccgctactggcgcgacgcaggcacgcaccggcaacggcgtgaacgtaccggcaaacgctgctggtgcgtctggtgttgcgggcggtaccggcaaaccccggacgaccggtgcaaccggcgagatacagagcatcgtggccaatatgccgaatgttccgctgccgaaagaggacgacaatgagcgcacccgcgccggcagcatcccgccgctgccgcagtccggtgaggcgcaggtgtctgaaggcgagcaaaccgtggctggaagccatcccacgacccgtgcggctcagcccattgccacgaacgccatgccgcagccgcgcgcgcatatgtcggaatcattggccgctcttgccgccagatccgccaaggccgcggcgtcgggcgacgccgtaatgcccccgtcattcgcagtgtcggcatcggcgcccggagccaatggagcagccatccccggatcatcgaagtcgcgtacgcggatgacggcaccaatcagccgcgatgccctgcggaacatgtctggcggccgtcctgcggcggctccgggtgcgaatgtgccgggtgtgcagacaccggcgcagcgtgcccaatccgacgcctttgaccccacggtcaccgttccgctgctaggcactgatggtacttcggtagatcagctgccgcctatggcccagatcatgccgccgagcttcgcgccccagcaggtgcacgatgtcaacgcgtcgaatgtcggacgcaatatcgaggaggacctgcctgaccagccactctgggggcagctcaagatcaaggtcatcgccatcgtcgtcgcgctggttctgctggtggtgggattggtcgccgcatggttcatcctgaacggagacaaccacggtggcggatccgacaatcaggattggccgaacaagaccgacatcgataacgtcccgttcggcaactcgaccacacagaactccacgtcaaagaactctgcggcacaatccgacatcgtgtacatccgcgttctgtaggcgacgcagaagttctcatgggcaccccttctactcacgggtaggaggggtgtttcatcgtacgcggtgactcacgctgtggacttatgctgtgggcccgtatcgtgctcgtattagctcctccggtttccatgaacgcggcatgcctgtttcggcaatctgaaagcgaccaatcggcattcgaggcgaatccatgtcgttgttcacccaccgctggacgaggtcaggtcaactcgctatcgtaagggacatgactgaactttcaaccatcatcatcggttccggccctgccggatatacggccgcaatctacctcgcacgcgccgggtatcgcccgaccattcttgcgggtgagctcacgccgggcggtcagctggtcaacaccaccaccgtggagaattaccccggtttccctgacggcattctcggaccggaactgatggatcgcatgcgcgatcaggcggagtctttcggcgcatccatcgaatatctcgatgtgacgagcgtcgatttcagctcctcccccaagaccgtcacgtgcagcaatggaagccaatatcacgccgatgccgtcatcatcaccaccggttcacagtaccgcaagctcggcattcccggcgagaccgagtattccggtcacggcgtatcgtattgcgccacctgcgatggtttcttcttcaaagacaagcccatcgtcgtggtgggcggaggagacagcgcgctcgaagaggcactgttcctgactcgtttcggctcttcggtgaccgtgttgcaccgccgcgaccagttccgcgcctccaagatcatggtcgagcgcgtgctgaacaatcccaagatcaccgtgaaaatgaatacggtggcgacagccattcgcgggcagaaaaacgccgccggcgagcagacaggcgctgatgcggtaaccgctgcggcacccgcagcgcagaacaccggaaatcttctctcgttgaagacgactccgatgctgaatgtctccggatcggcattgaatgctccctcttcgaccggcatttccctgtcggcaaaggctgaaaccgcagatgattccgccggctttgtggacattcgcgacaccgtgacaggcgagacgggcacgttgcccgccgagggcatcttcgtggcgatcggccatgaaccggccacgcgttttgcgaagggttccgtggatatggatgacgacgggtacattctggtctccggtgccggaacgcatacttccatgcctggagtgttcgccgccggtgactgcgttgaccgggtgtaccgtcaggccatcagtgccgcaggcatgggatgccgcgccgcgctggacgcacaatcctacctggcctcactgcactgatccaacagcacagctcgacctgtcggcgaaatcaaacctcatcacagacgatgatattgcttcaccggcgggttgagctacacaaatattgcttgcattgtcagtaatcacaaacgaaacgacagactgaccgaaatagcgctgcggacgcttaccagcgccggagaatcgcatcagaacgacaatccgctcaaatctagcgcattgtactggaccgatttcaactcatattgctcaacagagttttcggtaatgaattttcacgtgcatgcaataggacagttatacgtgcggttcattgcattagtcctctgactgcaaatgccacgacagttgctttatacgcgttctgccggagaggcaatgaatacctctcggcagaccagatcatacagctcatgaacggcatgaccgttgtttcccgttgtgtgatgatggcggctcacaccgttgtgtggctcgcaacctcacacccattttgccgccgcgccctcgactgccgtgggaatcagcatgctgaggatgcgttccatatcctcaggggaggaaaacacgatttcgattcgaccgtgcttttgcgtacccttgatggacactttggtgtcaaaatgattttcaaggttgttgacaatcggagaaccggcccaaggattgttcttcgtcggccttaccttcttgggcacgttgctttctgcgttcttcagcgccacgatttcctcggtgctgcgaaccgaaagcccctcccctatgattcgagtggccagcttgtcgatttcactttcgtcattcaaaccaagaagagctcgcgcatgccctgcggacagtacgcctgcggcaactttcttctgcacggacgcaggaagattcagcagacgcaatgtgttcgcgatttgcggtcgcgatttcgagatcgacttggatagttcagcctgagtcaggccgaagtcatcaatcatctgctgatatgccgccgcctcttccagaggattcagtgcgacgcgatgaaggttctccagcagtgcatcacgcagcatctcgtcatctgacgtggttttgacaatcgccggaatcgtcttcagttgtgcaagttgtgatgcacgccagcgacgctcgcccataatgagctcgtatctctgcgatgtttcacgtgaaacatcactcttgctggactccccagcctgacgcttgcgaaccacgatcggctgcaatacgccgacttccttgatggacgcggccaactcattcagctcttcctcatcaaagacgctgcgcggctgctgcgcattcggaacgatggagctgacaggaatatccagcagatagccaccctcgacaggcttcaattttggagtttccttattatccttttccttgccggatgcctttgtgctctcggaacgctgagccggctgcgttttcttggaatcgctcgtcccctgtgctgttgctccgaaaaacatgtcactggggtgtgccatatcactgataccgggcatggcaacacgcttgccgctcttgggcttctccaccgttgtggacttgtgtacggcaggaatggaatccttcatggccggaatggtcttacgcttgatttcgccaagacgaaccggagcggtagactcactgtgttgttcagtaccgctcttatgggattcgaccttctctggcgcagccgcagctttctcttgaggggctttcttgttggctgtcgtctcctcggattcgagatcaacacccaattgctgctgttccgcatgagctgttctcgactcaccgggaagtgcggggaacagcgcacccaatcctttacccaaacgtgattttgaggtcatgggttactctcccctcttcgcgtcaattgcagccagcaccgaaggcgatcgacgggcgatttccaaggccgcttcgccataggcactcgctcccattccacgcgggtcatagctgatgactgtctttccgaaacttggagcctcagatatttttaccgtacggggaatcgtcgtatccagaacgatactcggatagtgactcttcacctctgagaacacttccctgctgagcaatgttcgtttatcaaacatagtgaccagcatagtcgacacagtcaaattagggttatagtgctcctgcaccaatcctatggtattgataagttgaccaagcccctccaaggcatagtattcagcttggatcggaatcaacatctcagacaccgcgcacatggagttgatgaccaacaggccaagactcggcgggcaatcgaccagaacatagtcataatgattgttcggatcctgcaggaatgattcgacggcttccttcagcagattgttgcgattcggcagatccgccacttccagttccgcacccgaaagttcaatggaagcgggaaccacatcgagccctgggatatcaggacaggttttcagtacctctccgattgtcattcgtccttcaagaacgtcatataccgaaggatcgctggtgccgtgaggaacaccgcatgccgtagaggcgttcccctggggatccatatcgatgaccagcacgtgagctccgtgagaggcgagagctgcggcaatattcaccgttgttgtcgtcttgccgacgccgcctttctggttggcgacggccaggcatcgggttctcgatggcagggggaacaatgcggcattcaggcgttcatagcgtgacgcctcatctgcaatctcggcacccaaagaggaaccatcattcccgaaaatccttctgaccgtttcagaagcagattccatggcaggaatcacagaggattcctgtgaatcattggatgtcatagtccctcctaaaaaacgaacaacatctaatttttcctagtcgtatggacatctcaagttgtgcacagcaatgtggataactgtggataagtatagtgcattagtgtgtgaacacttcgatcaacactagataaaccgtttatttccgccattttcctaatgtggattacatgtcgcaaataatgtggataactttgtgtactgtttgaaattgtggataactccattcttgcgaaaccatcgctttcgtgtttgacatccattgtttcacgtgaaacaatcttcggacagtcagcgatgtcgatgaagatataacagcattgtttatgcaatcaaaggcaatggatatcgtccgtctcaccccgcaatccaacctccgacagcggaagcagaattacgattcccatcagcgggggcatgggattatcgtgtgactcccacccatgggagccacacgataattagcgcttgtctacgagaacgacgtgcgtggattcgagaccgggagctactggagcttcaacgacacgagcacgcactcccccggcatgggaaatttgatgcttcgccttttcaatctcagcctgcgccgaacggcctttcaatgcgaccagtcgaccttgagggcgaagcagaggcaacgtccaaccggcaagcttggtcattggcgccactgctcgacaggtcactacagagaatggtttcaattcatcttcgtggtgcttgatacgatcgatgacctcgtcggaacgtgcgcgaataatcgtaacattctgcaggtccatgtcatccacgcactcttgcaaccattcgacacgacgttccatgggctcaatgagtgtaaacgcacaatccggcatgcatgctgccgcaacgattccagggaaaccgccgccactgccaacatcggcaatggtctttgccttgcttcgatcggtgacttcccgaatgaacgggacgcatgcggcggagttgaggatatgacgttcccagatgatggatatgtcgcgtgggcctatcaatccacgcagctcaccctcgcgggatagtttcacgtgaaacacttcgagcttgtcgtatgcttcgcccaatgcctcacgaactattgctgaatcatccagctcatcaccagatgtttcacgtgaaacaatatcgctcactcttcgctaccttcatcgacgtcggattcatcggcgttgctcttcatgtagatggtgacatagcgacgcggctcttcaccgtgagaacgagatttcagcccttcctcgcgaaccacatcatgaatgaccttgcgctcgaacgaattcatcggtttcaaatcaacgggctcaccggtgtcatgcacttcatcaatggcatcaagtgcaatgtcacgaagacgctgacgcttacgcttcaggaacccgtcaacatcaacaatcagatgcgagcgttcgccggtcttctgctgaacagcaagccgggtaagctgctgcaaagcatcgaccacttcaccattgcaaccaatgagatgcttgatatccgtatcgtcatcagcgatgatctgcaccatcggacgaccgttgcgaacacccatctcgatatcgccttcgtaatcggcgatgtccaataagccttccaagtagtcggcggcgatgtcagcttcttcattgagctgatcgatcgtcgtggtctcctcctgcgccatatcaccactcctttaagcgagtattacttccatagtgtaaaaaaaggaaacctcacggtcaaatagaggtttccaatcgtgtcactttttcttgcgattcttccgctggggctgcttgcgctggtatccccgctccagacgaacagcggcttcctggcgcgccttctccagttcctcttcctcaatcgaaagctgtccggccttggcgcgacgagcattctcctgacgatgatctcgaatctccttttcctcagctgcacgggaacccggggtcgggaacttgtacacctggaacaaggaacgggcaaggttgcatgcgttgttggtcagccagtacaccagcacggcgaacgggaacatgatgccggagaagatgtacatgatcgggaagccccaggtcatggcctgctgcatcttgtacgtggatccctgcatcgaagccttggggaggttcttgcgcatgttgttgaactgcatgtaccacatgcatgcgcacatcaacaggatgaagaagccgatgacgacctttccggaattgttggccgtaccgaaggtatcggtgacgctgacaccgaagacgcgggtttgcgcgaactgcttggcagtcgcctgatcgaatgcgccaagcgctcccctcttgccggtcgcgatatacggaatggcggaaagcatgtagaacatgcacatgaacacaggaccctgaatgacggcggtccaacacgaccccatggggttggcgtcattgtcctggtagagcttcatcatctcacggctcatggcctctttgctggcctgatcctttttgcccttgtacttgttctgaatatgctgcatcttgggctgcaaggcctgcatcttgcgcatcgacttcatctgcttgagataaatcggcaaaatacaggcgtgcaccacgagcacaaggaacacgatcgccagcacccaagagatgccgatcggtgccatgcccagcagggtgaggaacttatggaacaggaccatgacctgggtcatgagccactcaagtggggtcagcagcttatacagccagccccaaatgcctctgtcaagaagaaaatctccggaagtgttcatcaggccatctccttaatcatcggccattggtgtgagtcgaggcttctcatatgccttcgaccagcgaaatctgtagcacagtgaaaaatgttgcggaacatcatcgatgccgccacgactccaagggttgcagcgaagaaaacgccaaataaacagcacgattcctcttaccgcgccgaagcgccgaaccgcagtgatcgcgtaatgtgagcaactcggatagtacttgcagcatggcggcgttttcgccgaaatggccctctggtaccacttgatcatgccgataagcgccgatccgatggctgacatcagcgactcaccctgcgttcatgcgtagtcgtgactttggcgaagcaacgggaaaactgtcggtcaaggtcagcgaaatcgacacgcgatgcgctgggtttggctctcacgacgatatcgcactgcatcggaagcatatcttcatatcgtcttgcgagcacacgaaatcgacgcttcacacgattacgcgttacagcgttaccaacagccttgctgacggcaagtcccatacgtctcatgatatccgcagatgcctgaacatcacgggtatcgtcatgcaccacaaagtgcacgacgatatccgaatccgtcaccttgaagcgacgcttcagcactgcgatgaagtcacgatggcttttcagccgcttcactcgccttcgtcacctaccgcaatcaggcggacagagacttacgtcccttgttacggcggcggttgatcatcgcgcggccggaacgggtgcgcatgcgcacgcggaaaccatgcttcatcgagcgacggcggttgttgggctggaatgtcctcttcatagttatgctcccggtttttgccatgctgatgcacggctctcatgagtcaagctctataacggtactctgagccatgcccaaaaatcaaaatgaaaacaatttcttcacgatttatcagtgtgtcgtgccccttgcagagcagcggaaaacattggaaacacgccaaaacatgtagaaaagttatccacaaattacatgaatgttattcacaattgaggcgacacaacacgctaagctgtggataacttggctaaagtggagtacatatatcctgttgttgttgtacttattatagctaccgtagcgtatccgctgcggtgcgcaccggcacacatacctgaaggaggtcaca
